(19) United States
(12) Patent Application Publication
(10) Pub. No.: US 2019/0359983 A1
(43) Pub. Date: Nov. 28, 2019

(54) TARGETED OLIGONUCLEOTIDES

(71) Applicant: CARIS SCIENCE, INC., Irving, TX (US)

(72) Inventors: Heather O'Neill, Mesa, AZ (US); Günter Mayer, Bonn (DE); Sonal Tonapi, Phoenix, AZ (US); Vaishali Pannu, Gilbert, AZ (US); Mark Miglarese, Phoenix, AZ (US); David Spetzler, Paradise Valley, AZ (US)

(21) Appl. No.: 16/482,161

(22) PCT Filed: Feb. 2, 2018
(86) PCT No.: PCT/US2018/016634

§ 371 Date: Jul. 30, 2019

Related U.S. Application Data
(60) Provisional application No. 62/453,988, filed on Feb. 2, 2017.
(60) Provisional application No. 62/477,751, filed on Mar. 28, 2017.
(60) Provisional application No. 62/490,595, filed on Apr. 26, 2017.
(60) Provisional application No. 62/595,954, filed on Dec. 7, 2017.

(51) Int. Cl. C12N 15/115; A61K 31/7088; A61K 9/51; A61K 47/50

(52) U.S. Cl. CPC C12N 15/115; A61K 31/7088; A61K 9/51; B82Y 5/00; C12N 2310/16; C12N 2310/51; C12N 2320/32; A61K 47/50

(57) ABSTRACT

Methods and compositions are provided for oligonucleotides that bind targets of interest. The targets include cells and microvesicles, such as those derived from various diseases. The oligonucleotides can be used for diagnostic and therapeutic purposes. The target of the oligonucleotides can be a member of a ribonucleoprotein or spliceosomal complex such heterologous nuclear ribonucleoprotein U (hnRNP U).

### RELATED APPLICATIONS

[0001] This application claims the benefit of priority to United States Provisional Patent Application Ser. Nos. 62/453,988, filed Feb. 2, 2017; 62/477,751, filed Mar. 28, 2017; 62/490,595, filed Apr. 26, 2017; and 62/595,954, filed Dec. 7, 2017. This application is related to International Patent Application Nos. PCT/US2016/021632, filed Mar. 9, 2016; PCT/US2016/040157, filed Jun. 29, 2016; and PCT/US2016/044595, filed Jul. 28, 2016; all of which applications are incorporated herein by reference in their entirety.

### SEQUENCE LISTING SUBMITTED VIA EFS-WEB

[0002] The entire content of the following electronic submission of the sequence listing via the USPTO EFS-WEB server, as authorized and set forth in MPEP § 1730 II.B.2(a), is incorporated herein by reference in its entirety for all purposes. The sequence listing is within the electronically filed text file that is identified as follows:

[0003] File Name: 826602_SeqListing_ST25.txt

[0004] Date of Creation: Feb. 1, 2018

[0005] Size (bytes): 897,393 bytes

### BACKGROUND OF THE INVENTION

[0006] The invention relates generally to the field of aptamers. The aptamers may be useful as therapeutics and in diagnostics of cancer and/or other diseases or disorders. The invention further relates to materials and methods for the administration of aptamers capable of binding to desired targets. The targets may be derived from cells indicative of cancer, including without limitation a lymphoma.

[0007] Aptamers are oligomeric nucleic acid molecules having specific binding affinity to molecules, which may be through interactions other than classic Watson-Crick base pairing. Unless otherwise specified, an “aptamer” as the term is used herein can refer to nucleic acid molecules that can be used to characterize a phenotype, regardless of manner of target recognition. Unless other specified, the terms “aptamer,” “oligonucleotide,” “polynucleotide,” or the like may be used interchangeably herein.

[0008] Aptamers, like peptides generated by phage display or monoclonal antibodies (“mAbs”), are capable of specifically binding to selected targets and modulating the target's activity, e.g., through binding aptamers may block their target's ability to function. Created by an in vitro selection process from pools of random sequence oligonucleotides, aptamers have been generated for over 100 proteins including growth factors, transcription factors, enzymes, immunoglobulins, and receptors. A typical aptamer is 10-15 kDa in size (30-45 nucleotides), binds its target with sub-nanomolar affinity, and discriminates against closely related targets (e.g., aptamers will typically not bind other proteins from the same gene family). A series of structural studies have shown that aptamers are capable of using the same types of binding interactions (e.g., hydrogen bonding, electrostatic complementarity, hydrophobic contacts, steric exclusion) that drive affinity and specificity in antibody-antigen complexes.

[0009] Aptamers have a number of desirable characteristics for use as therapeutics and diagnostics including high specificity and affinity, biological efficacy, and excellent pharmacokinetic properties. In addition, they offer specific competitive advantages over antibodies and other protein biologics, for example:

[0010] Speed and control. Aptamers are produced by an entirely in vitro process, allowing for the rapid generation of initial leads, including therapeutic leads. In vitro selection allows the specificity and affinity of the aptamer to be tightly controlled and allows the generation of leads, including leads against both toxic and non-immunogenic targets.

[0011] Toxicity and Immunogenicity. Aptamers as a class have demonstrated little or no toxicity or immunogenicity. In chronic dosing of rats or woodchucks with high levels of aptamer (10 mg/kg daily for 90 days), no toxicity is observed by any clinical, cellular, or biochemical measure. Whereas the efficacy of many monoclonal antibodies can be severely limited by immune response to antibodies themselves, it is extremely difficult to elicit antibodies to aptamers most likely because aptamers cannot be presented by T-cells via the MHC and the immune response is generally trained not to recognize nucleic acid fragments.

[0012] Administration. Whereas most currently approved antibody therapeutics are administered by intravenous infusion (typically over 2-4 hours), aptamers can be administered by subcutaneous injection (aptamer bioavailability via subcutaneous administration is >80% in monkey studies (Tucker et al., J. Chromatography B. 732: 203-212, 1999)). This difference is primarily due to the comparatively low solubility and thus large volumes necessary for most therapeutic mAbs. With good solubility (>150 mg/mL) and comparatively low molecular weight (aptamer: 10-50 kDa; antibody: 150 kDa), a weekly dose of aptamer may be delivered by injection in a volume of less than 0.5 mL. In addition, the small size of aptamers allows them to penetrate into areas of conformational constrictions that do not allow for antibodies or antibody fragments to penetrate, presenting yet another advantage of aptamer-based therapeutics or prophylaxis.

[0013] Scalability and cost. Aptamers are chemically synthesized and are readily scaled as needed to meet production demand for diagnostic or therapeutic applications. Whereas difficulties in scaling production are currently limiting the availability of some biologics and the capital cost of a large-scale protein production plant is enormous, a single large-scale oligonucleotide synthesizer can produce upwards of 100 kg/year and requires a relatively modest initial investment. The current cost of goods for aptamer synthesis at the kilogram scale is estimated at $100/g, comparable to that for highly optimized antibodies.

[0014] Stability. Aptamers are chemically robust. They are intrinsically adapted to regain activity following exposure to factors such as heat and denaturants and can be stored for extended periods (>1 yr) at room temperature as lyophilized powders.

### INCORPORATION BY REFERENCE

[0015] All publications, patents and patent applications mentioned in this specification are herein incorporated by reference to the same extent as if each individual publication, patent or patent application was specifically and individually indicated to be incorporated by reference.

### SUMMARY OF THE INVENTION

[0016] Compositions and methods of the invention provide aptamers that bind biomarkers of interest. In various embodiments, oligonucleotide probes of the invention are used in diagnostic, prognostic or theranostic processes to screen a biological sample for the presence or levels of biomarkers, including without limitation surface antigens, determined to provide a relevant readout. The diagnosis may be related to a disease or disorder, e.g., a cancer. In other embodiments, oligonucleotide probes of the invention are chemically modified or comprised within a pharmaceutical composition for therapeutic or medical imaging applications.

[0017] In an aspect, the invention provides an oligonucleotide comprising a sequence selected from any one of SEQ ID NOs. 4357-4368 or 4372-4407. In a preferred embodiment, the oligonucleotide comprises a sequence according to SEQ ID NO. 4357, i.e., the sequence of aptamer C10.36. The invention further provides an oligonucleotide having a substitution in aptamer C10.36 such as in SEQ ID NOs. 4372-4407. The substitution can be chosen to such that the aptamer retains or improves upon desired such as target recognition and G quadruplex structure. In a related aspect, the invention provides an oligonucleotide comprising a sequence selected from any one of SEQ ID NOs. 4357-4368 or 4372-4407, and a 5′ region with sequence 5′-CTAGCATGACTGCAGTACGT (SEQ ID NO. 131), a 3′ region with sequence 5′-CTGTCTCTTATACACATCTGACGCTGCCGACGA (SEQ ID NO. 132), or both.

[0018] The oligonucleotide of the invention can be capable of binding to a target in any one of Table 29, Table 31, Table 32, Table 39, Table 40, Table 41, Tables 46-49, Table 54, Tables 57-59 or a complex comprising one or more of such targets therein. In some embodiments, the oligonucleotide is capable of regulating cellular expression of a gene in any one of Tables 50-53. In some embodiments, the oligonucleotide is capable of regulating splicing of a gene in Table 55. In some embodiments, the oligonucleotide is capable of regulating MYC function, MALAT1 function, or both. For example, the MYC function can be expression, downstream signaling, transcription regulation, histone acetylation, chromatin remodeling, DNA methylation, or any combination thereof. In some embodiments, the oligonucleotide is capable of capable of binding to Ramos cells, binding to SUDHL1 cells, binding to Ramos 2G6C10 cells, binding to MEC1 cells, killing Ramos cells, killing SUDHL1 cells, killing Ramos 2G6C10 cells, or any combination thereof. The oligonucleotide can be capable of binding to complex comprising a protein selected from the group consisting of PARP1, HIST1H1B, HIST1H1D, NCL, FBL, SFPQ, RPL12, ACTB, HIST1H4A, SSBP1, NONO, H2AFJ, and DDX21, or a complex, subunit or fragment thereof. The oligonucleotide can be capable of binding to a complex comprising a protein selected from the group consisting of Cluster of Actin, cytoplasmic 1; Nucleolin; Isoform C1 of Heterogeneous nuclear ribonucleoproteins C1/C2; splicing factor, proline- and glutamine-rich; histone H4; Histone H1.5; NHP2-like protein 1; heterogeneous nuclear ribonucleoproteins A2/B1; rRNA 2′-O-methyltransferase fibrillarin; ATP synthase subunit alpha, mitochondrial; Nucleolar RNA helicase 2/DDX21; 60S ribosomal protein L30; 60S ribosomal protein L26, or a complex, subunit or fragment thereof. In some embodiments, the oligonucleotide is capable of binding to Heterogeneous nuclear ribonucleoprotein U (hnRNP U), or a complex, subunit or fragment thereof. The oligonucleotide can be capable of binding to a complex comprising a protein selected from the group consisting of 60S ribosomal protein L11; Histone H1.2, H1.4, H1.3, H1.5; 40S ribosomal protein L11; Histone H4; Heterogeneous nuclear ribonucleoproteins; Histone H2A, H2B; ATP synthase subunit alpha, mitochondrial; rRNA 2′-O-methyltransferase fibrillarin P2; Heterogeneous nuclear ribonucleoprotein H; Nucleolin; Heterogeneous nuclear ribonucleoprotein U, or a complex, subunit or fragment thereof. The oligonucleotide can be capable of binding to cells comprising cell surface Nucleolin; RNA-binding motif protein, X chromosome; Ubiquitin-60S ribosomal protein L40; Heat shock cognate 71 kDa protein; Prohibitin; Heterologous nuclear ribonucleoprotein U; rRNA 2′-O-methyltransferase fibrillarin; RNA-binding protein 14; 78 kDa glucose-regulared protein; 60S ribosomal protein L22; Heterologous nuclear ribonucleoproteins C1/C2; Actin, cytoplasmic 2; Nucleophosmin; Heterologous nuclear ribonucleoprotein A1; Splicing factor, proline- and glutamine-rich; Histone H3.3, or a complex, subunit or fragment thereof. The oligonucleotide can be capable of binding to cells comprising cell surface Cluster of Actin, cytoplasmic 1 (P60709), Nucleolin, Isoform C1 of Heterogeneous nuclear ribonucleoproteins C1/C2, splicing factor, proline- and glutamine-rich, histone H4, Histone H1.5, NHP2-like protein 1, heterogeneous nuclear ribonucleoproteins A2/B1, rRNA 2′-O-methyltransferase fibrillarin, ATP synthase subunit alpha, mitochondrial, Nucleolar RNA helicase 2/DDX21, 60S ribosomal protein L30, 60S ribosomal protein L26, or a complex, subunit or fragment thereof. The oligonucleotide can be binding to cells comprising cell surface Calcyphosin-2; Heterogeneous nuclear ribonucleoprotein U; Non-POU domain-containing octamer-binding protein; Nucleolar RNA helicase 2; Poly [ADP-ribose] polymerase 1; Polyubiquitin-B; heterogeneous nuclear ribonucleoprotein r; Keratin, type 1 cytoskeletal 19, or a complex, subunit or fragment thereof. The oligonucleotide can be binding to cells comprising cell surface 60 kDa heat shock protein, mitochondrial; 78 kDa glucose-regulated protein; Histone H2B type F-S; Isoform 2 of Elongation factor 1-delta; RuvB-like 1; Isoform 2 of ATP synthase subunit alpha, mitochondrial; Prohibitin; Prohibitin-2, or a complex, subunit or fragment thereof. The oligonucleotide can be binding to cells comprising cell surface Nucleolin; histone H4; heterogeneous nuclear ribonucleoproteins A2/B1; Histone H2B type F-S; Heterogeneous nuclear ribonucleoprotein A; Histone H1.5; 78 kDa glucose-regulated protein; 60 kDa heat shock protein, mitochondrial; Nucleolar RNA helicase 2; Actin, cytoplasmic 1; Ig mu chain C region; Isoform 4 of Interleukin enhancer-binding factor 3; RNA-binding motif protein, X chromosome; RNA-binding protein 14; Isoform 1 of RNA-binding protein Raly; small nuclear ribonucleoprotein sm d3; NHP2-like protein 1; 60S ribosomal protein L12; glyceraldehyde-3-phosphate dehydrogenase; Polyubiquitin-B; RNA-binding protein EWS; Signal recognition particle 14 kDa protein; Poly [ADP-ribose] polymerase 1; Isoform 2 of Heterogeneous nuclear ribonucleoprotein A/B; Polyadenylate-binding protein 1; RNA-binding protein FUS; Non-POU domain-containing octamer-binding protein; Heterogeneous nuclear ribonucleoprotein A0; Heterogeneous nuclear ribonucleoprotein U; Insulin-like growth factor 2 mRNA-binding protein 1; rRNA 2′-O-methyltransferase fibrillarin; Isoform 2 of Elongation factor 1-delta; RuvB-like 1; 60S ribosomal protein L22; Heterogeneous nuclear ribonucleoprotein M; Isoform 2 of Heterogeneous nuclear ribonucleoprotein K; Polymerase delta-interacting protein 3; Histone H1.4; Histone H1.5; Small nuclear ribonucleoprotein Sm D2; histone H2A type 1; Histone H2A type 2-B; Pre-mRNA-processing factor 19; Isoform 2 of Heterogeneous nuclear ribonucleoprotein D0; Single-stranded DNA-binding protein, mitochondrial; 40S ribosomal protein S3; heterogeneous nuclear ribonucleoprotein r; 60S ribosomal protein L23a; Calcyphosin-2; Heat shock cognate 71 kDa protein, or a complex, subunit or fragment thereof. In various embodiments, the oligonucleotide or oligonucleotides of the invention are capable of binding to such proteins, complexes comprising such proteins, or cells displaying such complexes or proteins on their surface.

[0019] In a related aspect the invention provides an oligonucleotide aptamer that binds a target protein on the surface of a cell, wherein the binding to the cell results in alternative splicing patterns in the cell, cellular death, or both. In some embodiments, the target protein is part of a ribonucleoprotein or spliceosomal complex. In some embodiments, the target protein is heterologous nuclear ribonucleoprotein U (hnRNP U). In some embodiments, the target protein is selected from the proteins in any one of Table 29, Table 31, Table 32, Table 39, Table 40, Table 41, Tables 46-49, Table 54, Tables 57-59 or a complex comprising such protein therein.

[0020] The invention further provides an oligonucleotide comprising a nucleic acid sequence or a portion thereof that is at least 50, 55, 60, 65, 70, 75, 80, 85, 86, 86, 88, 89, 90, 95, 96, 97, 98, 99 or 100 percent homologous to an oligonucleotide sequence described above.

[0021] In another aspect, the invention provides a plurality of oligonucleotides comprising at least 1, 2, 3, 4, 5, 6, 7, 8, 9, 10, 11, 12, 13, 14, 15, 16, 17, 18, 19, 20, 25, 30, 40, 45, 50, 55, 60, 65, 70, 75, 80, 85, 90, 95, 100, 110, 120, 130, 140, 150, 160, 170, 180, 190, 200, 300, 400, 500, 600, 700, 800, 900, 1000, 2000, 3000, 4000, 5000, 6000, 7000, 8000, 9000, or at least 10000 different oligonucleotide sequences described above.

[0022] The oligonucleotide or the plurality of oligonucleotides provided by the invention may comprise a DNA, RNA, 2′-O-methyl or phosphorothioate backbone, or any combination thereof. The oligonucleotide or the plurality of oligonucleotides may comprise at least one of DNA, RNA, PNA, LNA, UNA, and any combination thereof.

[0023] In some embodiments, the oligonucleotide or the plurality of oligonucleotides comprises at least one functional modification selected from the group consisting of biotinylation, a non-naturally occurring nucleotide, a deletion, an insertion, an addition, and a chemical modification. The chemical modification can be chosen to modulate desired properties such as stability, capture, detection, or binding efficiency. In some embodiments, the chemical modification comprises at least one of C18, polyethylene glycol (PEG), PEG4, PEG6, PEG8, PEG12, and an SM(PEG)ₙ crosslinker (Thermo Scientific, Rockford, lL USA). The oligonucleotide or plurality of oligonucleotides can be labeled. The oligonucleotide or plurality of oligonucleotides can be attached to a nanoparticle, liposome, gold, magnetic label, fluorescent label, light emitting particle, or radioactive label. The liposome or particle can incorporate desired entities such as chemotherapeutic agents or detectable labels.

[0024] In an aspect, the invention provides an isolated oligonucleotide or plurality of oligonucleotides having a sequence as described above. In a related aspect, the invention provides a composition comprising such isolated oligonucleotide or plurality of oligonucleotides.

[0025] In some embodiments, the isolated oligonucleotide or at least one member of the plurality of oligonucleotides is capable of binding to Ramos cells, binding to SUDHL1 cells, binding to Ramos 2G6C10 cells, binding to MEC1 cells, killing Ramos cells, killing SUDHL1 cells, killing Ramos 2G6C10 cells, binding to a target in any one of Table 29, Table 31, Table 32, Table 39, Table 40, Table 41, Tables 46-49, Table 54, Tables 57-59 or a complex comprising such target therein, binding to a cell having a protein in any one of Table 29, Table 31, Table 32, Table 39, Table 40, Table 41, Tables 46-49, Table 54, Tables 57-59 or a complex comprising such protein on its surface, binding Heterogeneous nuclear ribonucleoprotein U, modulating cell proliferation, regulating cellular expression of a gene in any one of Tables 50-53, regulating splicing of a gene in Table 55, regulating MYC function, MALAT1 function, or any combination thereof. The cell proliferation can be neoplastic or dysplastic growth. The cell proliferation can be that of cancer cells such as disclosed herein, including without limitation that of lymphoma, leukemia, renal carcinoma, sarcoma, hemangiopericytoma, melanoma, abdominal cancer, gastric cancer, colon cancer, cervical cancer, prostate cancer, pancreatic cancer, breast cancer, or non-small cell lung cancer. In certain embodiments, the cell proliferation is that of leukemia, lymphoma or renal carcinoma cells.

[0026] The isolated oligonucleotide or plurality of oligonucleotides may bind to a cell surface splicing complexes or cell surface ribonucleoprotein complexes. Such bound outer complex may mediate cellular internalization of the complex. Such binding may also interfere with cellular machinery such as the MYC pathway or splicing.

[0027] In an aspect, the invention provides a method comprising synthesizing the at least one oligonucleotide or the plurality of oligonucleotides provided above. Techniques for synthesizing oligonucleotides are disclosed herein or are known in the art.

[0028] In another aspect, the invention provides a method comprising contacting a biological sample with the at least one oligonucleotide, the plurality of oligonucleotides, or composition as described above. The method can further comprise detecting a presence or level of at least one protein in Table 29, Table 31, Table 32, Table 39, Table 40, Table 41, Tables 46-49, Table 54, Tables 57-59 in the biological sample that is bound by the at least one oligonucleotide or at least one member of the plurality of oligonucleotides. In some embodiments, the method comprises detecting a presence or level of a Heterogeneous nuclear ribonucleoprotein U protein or complex thereof in the biological sample that is bound by the at least one oligonucleotide or at least one member of the plurality of oligonucleotides. As used herein, “a complex thereof” indicates that the protein can be found within the complex. For example, hnRNP U may be found with a ribonucleoprotein complex. Relatedly, the method may further comprise detecting a presence or level of a cell population in the biological sample that is bound by the at least one oligonucleotide or at least one member of the plurality of oligonucleotides. For example, the cells may display a protein in in Table 29, Table 31, Table 32, Table 39, Table 40, Table 41, Tables 46-49, Table 54, or Tables 57-59 on their surface. The cell population can be any desired population, including without limitation cells having or indicative of a disease or disorder, e.g., neoplastic, malignant, tumor, hyperplastic, or dysplastic cells. In some embodiments, the cell population comprises lymphoma, leukemia, renal carcinoma, sarcoma, hemangiopericytoma, melanoma, abdominal cancer, gastric cancer, colon cancer, cervical cancer, prostate cancer, pancreatic cancer, breast cancer, or non-small cell lung cancer cells.

[0029] The detecting step of the method may comprise detecting the at least one oligonucleotide or at least one member of the plurality of oligonucleotides. The presence or level of oligonucleotide serves as a proxy for the level of oligonucleotide's target. The oligonucleotides can be detecting using any desired technique such as described herein or known in the art, including without limitation at least one of sequencing, amplification, hybridization, gel electrophoresis, chromatography, and any combination thereof. Any useful sequencing method can be employed, including without limitation at least one of next generation sequencing, dye termination sequencing, pyrosequencing, and any combination thereof. In some embodiments, the detecting comprises transmission electron microscopy (TEM) of immunogold labeled oligonucleotides. In some embodiments, the detecting comprises confocal microscopy of fluor labeled oligonucleotides.

[0030] The detecting step of the method may comprise detecting the protein or cell using techniques described herein or known in the art for detecting proteins, including without limitation at least one of an immunoassay, enzyme immunoassay (EIA), enzyme-linked immunosorbent assay (ELISA), enzyme-linked oligonucleotide assay (ELONA), affinity isolation, immunoprecipitation, Western blot, gel electrophoresis, microscopy or flow cytometry.

[0031] In some embodiments of the method, the detected protein is associated with a microvesicle population. The method may further comprise isolating the microvesicle population prior to the contacting with the oligonucleotides, after the contacting, or both. The isolating may be in whole or in part. For example, the microvesicle population may be partially isolated from other components in the sample before or after contacting the sample with the oligonucleotide or plurality of oligonucleotides. The invention may use any appropriate techniques to isolate microvesicles. Various techniques of isolating microvesicles are disclosed herein or known in the art, including without limitation affinity purification, filtration, concentration, polymer precipitation, PEG precipitation, ultracentrifugation, a molecular crowding reagent, affinity selection, chromatography, or any combination thereof.

[0032] Any desired biological sample can be contacted with the oligonucleotide or plurality of oligonucleotides according to the invention. In various embodiments, the biological sample comprises a bodily fluid, tissue sample or cell culture. Any desired tissue sample can be contacted. In some embodiments, the tissue sample comprises lymphoma, leukemia, renal carcinoma, sarcoma, hemangiopericytoma, melanoma, abdominal cancer, gastric cancer, colon cancer, cervical cancer, prostate cancer, pancreatic cancer, breast cancer, or non-small cell lung cancer tissue. Similarly, any desired cell culture sample can be contacted. In certain embodiments, the cell culture comprises lymphoma, leukemia, renal carcinoma, sarcoma, hemangiopericytoma, melanoma, abdominal cancer, gastric cancer, colon cancer, cervical cancer, prostate cancer, pancreatic cancer, breast cancer, or non-small cell lung cancer cells. Any appropriate bodily fluid can be contacted, including without limitation peripheral blood, sera, plasma, ascites, urine, cerebrospinal fluid (CSF), sputum, saliva, bone marrow, synovial fluid, aqueous humor, amniotic fluid, cerumen, breast milk, broncheoalveolar lavage fluid, semen, prostatic fluid, cowper's fluid or pre-ejaculatory fluid, female ejaculate, sweat, fecal matter, hair oil, tears, cyst fluid, pleural and peritoneal fluid, pericardial fluid, lymph, chyme, chyle, bile, interstitial fluid, menses, pus, sebum, vomit, vaginal secretions, mucosal secretion, stool water, pancreatic juice, lavage fluids from sinus cavities, bronchopulmonary aspirates, blastocyl cavity fluid, or umbilical cord blood. In certain preferred embodiments, the bodily fluid comprises whole blood or a derivative or fraction thereof, such as sera or plasma. The bodily fluid may comprise cancer cells, including without limitation lymphoma, leukemia, renal carcinoma, sarcoma, hemangiopericytoma, melanoma, abdominal cancer, gastric cancer, colon cancer, cervical cancer, prostate cancer, pancreatic cancer, breast cancer, or non-small cell lung cancer cells.

[0033] The biological sample may be spiked with a purified or recombinant protein. In some embodiments, such protein is selected from Table 29, Table 31, Table 32, Table 39, Table 40, Table 41, Tables 46-49, Table 54, or Tables 57-59, or complexes, subunits or fragments thereof.

[0034] As desired, the method of detecting the presence or level of the at least one oligonucleotide, the plurality of oligonucleotides, or composition bound to a target can be used to characterize a phenotype. The phenotype can be any appropriate phenotype, including without limitation a disease or disorder. In such cases, the characterizing may include providing, or assisting in providing, at least one of diagnostic, prognostic and theranostic information for the disease or disorder. Characterizing the phenotype may comprise comparing the presence or level to a reference. Any appropriate reference level can be used. For example, the reference can be the presence or level determined in a sample from at least one individual without the phenotype or from at least one individual with a different phenotype. As a further example, if the phenotype is a disease or disorder, the reference level may be the presence or level determined in a sample from at least one individual without the disease or disorder, or with a different state of the disease or disorder (e.g., in remission, different stage or grade, different prognosis, metastatic versus local, etc).

[0035] As noted, the sample can be from a subject suspected of having or being predisposed to a disease or disorder. The disease or disorder can be any disease or disorder that can be assessed by the subject method. For example, the disease or disorder may be a cancer, a premalignant condition, an inflammatory disease, an immune disease, an autoimmune disease or disorder, a cardiovascular disease or disorder, neurological disease or disorder, infectious disease or pain.

[0036] As further described herein, the invention provides a kit comprising a reagent for carrying out the method. Similarly, the invention provides for the use of a reagent for carrying out the method. The reagent can be any useful reagent for carrying out the method. For example, the reagent can be the at least one oligonucleotide or the plurality of oligonucleotides, one or more primer for amplification or sequencing of such oligonucleotides, at least one binding agent to at least one protein, a binding buffer with or without MgCl₂, a sample processing reagent, a microvesicle isolation reagent, a cell isolation reagent, a detection reagent, a secondary detection reagent, a wash buffer, an elution buffer, a solid support, and any combination thereof. The microvesicle isolation reagent may comprise at least one of a concentrator unit, a filtration unit, a polymer, PEG, a size exclusion column, a binding agent to a microvesicle antigen, and any combination thereof; and/or the detection or secondary detection agent comprises streptavidin-horse radish peroxide (HRP), a streptavidin-conjugated fluorophore, a streptavidin-conjugated quantum dot, and any combination thereof.

[0037] In an aspect, the invention provides a method of imaging a cell or tissue, comprising contacting the cell or tissue with at least one oligonucleotide or plurality of oligonucleotides as described above, and detecting the at least one oligonucleotide or the plurality of oligonucleotides in contact with at least one cell or tissue. In some embodiments, the at least one oligonucleotide or the plurality of oligonucleotides is labeled, e.g., in order to facilitate detection or medical imaging. The oligonucleotide or plurality of oligonucleotides can be attached to a nanoparticle, liposome, gold, magnetic label, fluorescent label, light emitting particle, radioactive label, or other useful label such as disclosed herein or known in the art. The oligonucleotides can be administered to a subject prior to the detecting. The at least one cell or tissue can comprise cells displaying hnRNP U or another protein from Table 29, Table 31, Table 32, Table 39, Table 40, Table 41, Tables 46-49, Table 54, or Tables 57-59 on their surface. In some embodiments, the at least one cell or tissue is from a subject suspected of having or being predisposed to a disease or disorder. In some embodiments, the at least one cell or tissue comprises neoplastic, malignant, tumor, hyperplastic, or dysplastic cells. For example, the at least one cell or tissue may comprise lymphoma, leukemia, renal carcinoma, sarcoma, hemangiopericytoma, melanoma, abdominal cancer, gastric cancer, colon cancer, cervical cancer, prostate cancer, pancreatic cancer, breast cancer, or non-small cell lung cancer cells. As further described herein, the invention provides a kit comprising a reagent for carrying out the imaging method. Similarly, the invention provides for the use of a reagent for carrying out the imaging method. The reagent can be any useful reagent for carrying out the method. For example, the reagent can be the at least one oligonucleotide or the plurality of oligonucleotides, one or more primer for amplification or sequencing of such oligonucleotides, at least one binding agent to at least one protein, a binding buffer with or without MgCl₂, a sample processing reagent, a microvesicle isolation reagent, a cell isolation reagent, a detection reagent, a secondary detection reagent, a wash buffer, an elution buffer, a solid support, and any combination thereof.

[0038] In an aspect, the invention provides a pharmaceutical composition comprising a therapeutically effective amount of the at least one oligonucleotide or the plurality of oligonucleotides of the invention, or a salt thereof, and a pharmaceutically acceptable carrier, diluent, or both. In some embodiments, the oligonucleotides are attached to a toxin or chemotherapeutic agent. In some embodiments, the oligonucleotides are attached to a liposome or nanoparticle. The liposome or nanoparticle may comprise a small molecule, drug, toxin or chemotherapeutic agent. In such embodiments, the at least one oligonucleotide or the plurality of oligonucleotides can be used for targeted delivery of the toxin, chemotherapeutic agent, liposome or nanoparticle to a desired target cell or tissue. In a related aspect, the invention provides a method of treating or ameliorating a disease or disorder in a subject in need thereof, comprising administering such pharmaceutical composition to the subject. In another related aspect, the invention provides a method of inducing cytotoxicity in a subject, comprising administering such pharmaceutical to the subject. The pharmaceutical composition can be administered in any useful format. In various embodiments, the administering comprises at least one of intradermal, intramuscular, intraperitoneal, intravenous, subcutaneous, intranasal, epidural, oral, sublingual, intracerebral, intravaginal, transdermal, rectal, by inhalation, topical administration, or any combination thereof. The carrier or diluent can be any useful carrier or diluent, as described herein or known in the art. As desired, the pharmaceutical composition can be administered in combination with additional known drugs, immunotherapies, chemotherapeutic agents, or the like. In another related aspect, the invention provides a method comprising detecting a transcript or protein in a biological sample from a subject, comparing a presence or level of the transcript to a reference, and administering the pharmaceutical composition above to the subject based on the comparison. In some embodiments, the transcript or protein is selected from any one of Table 29, Table 31, Table 32, Table 39, Table 40, Table 41, Tables 46-55 or Tables 57-59. The administering can be through any useful methods, including without limitation at least one of intradermal, intramuscular, intraperitoneal, intravenous, subcutaneous, intranasal, epidural, oral, sublingual, intracerebral, intravaginal, transdermal, rectal, by inhalation, topical administration, or any combination thereof. As further described herein, the invention provides a kit comprising a reagent for carrying out the administering. Similarly, the invention provides for the use of a reagent for carrying out the administering. The reagent can be any useful reagent for carrying out the method. For example, the reagent may comprise the pharmaceutical composition and/or items needed for the desired administration route.

[0039] In an aspect, the invention provides nanoparticle conjugated to the at least one oligonucleotide or the plurality of oligonucleotides provided by the invention. In some embodiments, the nanoparticle comprises a useful payload, including without limitation a small molecule, drug, toxin or chemotherapeutic agent. The nanoparticle can be selected for desired properties. For example, if internalization inside a cell is desired, it may be preferred that the nanoparticle is ≤100 nm in diameter, e.g., ≤10 nm, 20 nm, 30 nm, 40 nm, 50 nm, 60 nm, 70 nm, 80 nm, 90 nm, or ≤100 nm in diameter. In other embodiments, the nanoparticle is ≥100 nm in diameter. In a related aspect, the invention provides a pharmaceutical composition comprising a therapeutically effective amount of the conjugated nanoparticle, and a pharmaceutically acceptable carrier, diluent, or both. In still another related aspect, the invention provides a method of treating or ameliorating a disease or disorder in a subject in need thereof, comprising administering the pharmaceutical composition to the subject. The invention further provides a method of inducing cytotoxicity in a subject, comprising administering the pharmaceutical composition to the subject. In another related aspect, the invention provides a method comprising detecting a transcript or protein in a biological sample from a subject, comparing a presence or level of the transcript to a reference, and administering the pharmaceutical composition to the subject based on the comparison. In some embodiments, the transcript or protein is selected from any one of Table 29, Table 31, Table 32, Table 39, Table 40, Table 41, Tables 46-55 or Tables 57-59. The administering can be through any useful methods, including without limitation at least one of intradermal, intramuscular, intraperitoneal, intravenous, subcutaneous, intranasal, epidural, oral, sublingual, intracerebral, intravaginal, transdermal, rectal, by inhalation, topical administration, or any combination thereof. As further described herein, the invention provides a kit comprising a reagent for carrying out the administering. Similarly, the invention provides for the use of a reagent for carrying out the administering. The reagent can be any useful reagent for carrying out the method. For example, the reagent may comprise the pharmaceutical composition and/or items needed for the desired administration route.

[0040] In still another aspect, the invention provides a method of immune therapy comprising using a protein in any one of Table 29, Table 31, Table 32, Table 39, Table 40, Table 41, Tables 46-54 or Tables 57-59 as a target for CAR-T therapy of a disease or disorder. The invention also provides a method of immune therapy comprising identifying a target of an oligonucleotide probe, and using the target for CAR-T therapy of a disease or disorder. The invention also provides method comprising identifying an oligonucleotide probe against an MHC loaded with a peptide. The identifying can be performed with MHC complexes on cells or using an in vitro system. The invention also provides a method comprising using an oligonucleotide probe against an MHC loaded with a peptide to detect or target the loaded MHC. As further described herein, the invention provides a kit comprising a reagent for carrying out the method. Similarly, the invention provides for the use of a reagent for carrying out the method. The reagent can be any useful reagent for carrying out the method. For example, the reagent may comprise one or more oligonucleotide probe, isolated MHC constructs, peptides of interest, and various buffers and the like for performing the method.

[0041] In an aspect, the invention provides a multipartite (chimeric) construct that comprises a first segment that binds to a first target and a second segment that binds to a second target. As desired, the first segment, the second segment, or both, comprises SEQ ID NO. 4357, or a region that is at least 50, 55, 60, 65, 70, 75, 80, 85, 90, 95, 96, 97, 98, 99 or 100 percent homologous thereto. For example, the first segment can be according to any of SEQ ID NOs. 4372-4407.

[0042] In an embodiment, the first target comprises a protein selected from any one of Table 29, Table 31, Table 32, Table 39, Table 40, Table 41, Tables 46-55 or Tables 57-59. For example, the first target can be a protein selected from the group consisting of PARP1, HIST1H1B, HIST1H1D, NCL, FBL, SFPQ, RPL12, ACTB, HIST1H4A, SSBP1, NONO, H2AFJ, and DDX21, or a complex, subunit or fragment thereof. In some embodiments, the first target comprises Heterogeneous nuclear ribonucleoprotein U or a complex thereof. The first target can be a protein selected from the group consisting of Cluster of Actin, cytoplasmic 1; Nucleolin; Isoform C1 of Heterogeneous nuclear ribonucleoproteins C1/C2; splicing factor, proline- and glutamine-rich; histone H4; Histone H1.5; NHP2-like protein 1; heterogeneous nuclear ribonucleoproteins A2/B1; rRNA 2′-O-methyltransferase fibrillarin; ATP synthase subunit alpha, mitochondrial; Nucleolar RNA helicase 2/DDX21; 60S ribosomal protein L30; 60S ribosomal protein L26, or a complex, subunit or fragment thereof. The first target can be a protein selected from the group consisting of 60S ribosomal protein L11; Histone H1.2, H1.4, H1.3, H1.5; 40S ribosomal protein L11; Histone H4; Heterogeneous nuclear ribonucleoproteins; Histone H2A, H2B; ATP synthase subunit alpha, mitochondrial; rRNA 2′-O-methyltransferase fibrillarin P2; Heterogeneous nuclear ribonucleoprotein H; Nucleolin; Heterogeneous nuclear ribonucleoprotein U, or a complex, subunit or fragment thereof. The first target can be a protein selected from the group consisting of Nucleolin; RNA-binding motif protein, X chromosome; Ubiquitin-60S ribosomal protein L40; Heat shock cognate 71 kDa protein; Prohibitin; Heterologous nuclear ribonucleoprotein U; rRNA 2′-O-methyltransferase fibrillarin; RNA-binding protein 14; 78 kDa glucose-regulared protein; 60S ribosomal protein L22; Heterologous nuclear ribonucleoproteins C1/C2; Actin, cytoplasmic 2; Nucleophosmin; Heterologous nuclear ribonucleoprotein A1; Splicing factor, proline- and glutamine-rich; Histone H3.3, or a complex, subunit or fragment thereof. The first target can be a protein selected from the group consisting of Cluster of Actin, cytoplasmic 1 (P60709), Nucleolin, Isoform C1 of Heterogeneous nuclear ribonucleoproteins C1/C2, splicing factor, proline- and glutamine-rich, histone H4, Histone H1.5, NHP2-like protein 1, heterogeneous nuclear ribonucleoproteins A2/B1, rRNA 2′-O-methyltransferase fibrillarin, ATP synthase subunit alpha, mitochondrial, Nucleolar RNA helicase 2/DDX21, 60S ribosomal protein L30, 60S ribosomal protein L26, or a complex, subunit or fragment thereof. The first target can be a protein selected from the group consisting of Calcyphosin-2; Heterogeneous nuclear ribonucleoprotein U; Non-POU domain-containing octamer-binding protein; Nucleolar RNA helicase 2; Poly [ADP-ribose]polymerase 1; Polyubiquitin-B; heterogeneous nuclear ribonucleoprotein r; Keratin, type 1 cytoskeletal 19, or a complex, subunit or fragment thereof. The first target can be a protein selected from the group consisting of 60 kDa heat shock protein, mitochondrial; 78 kDa glucose-regulated protein; Histone H2B type F-S; Isoform 2 of Elongation factor 1-delta; RuvB-like 1; Isoform 2 of ATP synthase subunit alpha, mitochondrial; Prohibitin; Prohibitin-2, or a complex, subunit or fragment thereof. The first target can be a protein selected from the group consisting of Nucleolin; histone H4; heterogeneous nuclear ribonucleoproteins A2/B1; Histone H2B type F-S; Heterogeneous nuclear ribonucleoprotein A1; Histone H1.5; 78 kDa glucose-regulated protein; 60 kDa heat shock protein, mitochondrial; Nucleolar RNA helicase 2; Actin, cytoplasmic 1; Ig mu chain C region; Isoform 4 of Interleukin enhancer-binding factor 3; RNA-binding motif protein, X chromosome; RNA-binding protein 14; Isoform 1 of RNA-binding protein Raly; small nuclear ribonucleoprotein sm d3; NHP2-like protein 1; 60S ribosomal protein L12; glyceraldehyde-3-phosphate dehydrogenase; Polyubiquitin-B; RNA-binding protein EWS; Signal recognition particle 14 kDa protein; Poly [ADP-ribose] polymerase 1; Isoform 2 of Heterogeneous nuclear ribonucleoprotein A/B; Polyadenylate-binding protein 1; RNA-binding protein FUS; Non-POU domain-containing octamer-binding protein; Heterogeneous nuclear ribonucleoprotein A0; Heterogeneous nuclear ribonucleoprotein U; Insulin-like growth factor 2 mRNA-binding protein 1; rRNA 2′-O-methyltransferase fibrillarin; Isoform 2 of Elongation factor 1-delta; RuvB-like 1; 60S ribosomal protein L22; Heterogeneous nuclear ribonucleoprotein M; Isoform 2 of Heterogeneous nuclear ribonucleoprotein K; Polymerase delta-interacting protein 3; Histone H1.4; Histone H1.5; Small nuclear ribonucleoprotein Sm D2; histone H2A type 1; Histone H2A type 2-B; Pre-mRNA-processing factor 19; Isoform 2 of Heterogeneous nuclear ribonucleoprotein D0; Single-stranded DNA-binding protein, mitochondrial; 40S ribosomal protein S3; heterogeneous nuclear ribonucleoprotein r; 60S ribosomal protein L23a; Calcyphosin-2; Heat shock cognate 71 kDa protein, or a complex, subunit or fragment thereof.

[0043] The first segment may be capable of binding to Ramos cells.

[0044] As described herein, the invention contemplates various configuration of the multipartite construct. See, e.g., FIGS. 23A-D herein and related discussion herein. The construct may further comprise a first oligonucleotide primer region and/or a second oligonucleotide primer region surrounding the first segment.

[0045] In some embodiments, the second target of the multipartite construct of the invention comprises an immunomodulatory molecule. For example, the immunomodulatory molecule may be selected from at least one of a member of the innate immune system, a member of the complement system, C1q, C1r, C1s, C1, C3a, C3b, C3d, C5a, C2, C4, and any combination thereof. In some embodiments, the second target comprises C1q or a subunit thereof, e.g., the A, B or C subunit. The second target may comprise any number of post-translational modifications. For example, when the immunomodulatory molecule comprises C1q A, the A subunit may have at least one modification selected from Table 46.

[0046] As noted above, the invention contemplates various configuration of the multipartite construct. In various embodiments of the invention, the second segment comprises an antibody or oligonucleotide. And in preferred embodiments, the second segment comprises an oligonucleotide. Such a second segment may further comprise a first oligonucleotide primer region and/or a second oligonucleotide primer region surrounding the second segment. The second segment may comprise an oligonucleotide as provided by the invention. For example, the oligonucleotide can be as described above, including without limitation a sequence selected from any one of SEQ ID NOs. 137-969 and 1072-4325, or a region that is at least 50, 55, 60, 65, 70, 75, 80, 85, 90, 95, 96, 97, 98, 99 or 100 percent homologous thereto.

[0047] As desired, the multipartite construct of the invention can include a linker region between the first segment and second segment. The linker region can be chosen to achieve any desired purpose, such as modulate the distance between the first and second targets, e.g., to relieve steric hindrance or to bring the targets into close proximity. The linker can also provide certain functionalities, including without limitation an immunostimulatory sequence, an anti-proliferative sequence, a pro-apoptotic sequence, or some combination thereof. In an embodiment, the linker region comprises one or more CpG motif. In another embodiment, the linker comprises a polyG sequence. In still other embodiments, the multipartite construct of the invention comprises an immunostimulating moiety, a membrane disruptive moiety, or both.

[0048] The multipartite construct of the invention can be modified to comprise at least one oligonucleotide chemical modification. Various useful modifications are disclosed herein or known in the art. In some embodiments, the modification is selected from the group consisting: of a chemical substitution at a sugar position; a chemical substitution at a phosphate position; a chemical substitution at a base position of the nucleic acid; and any combination thereof. The modification can be selected from the group consisting of: incorporation of a modified nucleotide, 3′ capping, conjugation to an amine linker, conjugation to a high molecular weight, non-immunogenic compound, conjugation to a lipophilic compound, conjugation to a drug, conjugation to a cytotoxic moiety, labeling with a radioisotope, and any combination thereof. In a preferred embodiment, the non-immunogenic, high molecular weight compound is polyalkylene glycol, such as polyethylene glycol.

[0049] In preferred embodiments, the multipartite construct comprises an oligonucleotide polymer. Such a construct can be flanked by a first oligonucleotide primer region and a second oligonucleotide primer region. In various embodiments, the second segment comprises an oligonucleotide provided by the invention, e.g., an oligonucleotide that can bind C1q or a subunit thereof. For example, the multipartite construct may comprise an oligonucleotide having a sequence according to any one of SEQ ID NO. 4358-4368, or that is at least 50, 55, 60, 65, 70, 75, 80, 85, 90, 95, 96, 97, 98, 99 or 100 percent homologous thereto.

[0050] In a related aspect, the invention provides a pharmaceutical composition comprising a therapeutically effective amount of the multipartite construct described herein, or a salt thereof, and a pharmaceutically acceptable carrier, diluent or both. In a related aspect, the invention provides a method of treating or ameliorating a disease or disorder in a subject in need thereof, comprising administering such pharmaceutical composition to the subject. The pharmaceutical composition can be administered in any useful format. In various embodiments, the administering comprises at least one of intradermal, intramuscular, intraperitoneal, intravenous, subcutaneous, intranasal, epidural, oral, sublingual, intracerebral, intravaginal, transdermal, rectal, by inhalation, topical administration, or any combination thereof. The carrier or diluent can be any useful carrier or diluent, as described herein or known in the art.

[0051] In another related aspect, the invention provides a method of inducing killing of a cell, comprising contacting the cell with a multipartite construct described herein. In some embodiments, the cell that is killed comprises a disease or disorder.

[0052] As described above, the multipartite construct of the invention can be administered to a subject to treat a disease or disorder, or to induce cell killing. In various embodiments, the disease or disorder comprises a cancer, a premalignant condition, an inflammatory disease, an immune disease, an autoimmune disease or disorder, a cardiovascular disease or disorder, neurological disease or disorder, infectious disease or pain.

[0053] In an aspect, the invention provides a kit comprising a multipartite construct or a pharmaceutical composition provided by the invention, e.g., as described above. In a related aspect, the invention provides a kit comprising a reagent for carrying out the methods making use of such multipartite construct or a pharmaceutical composition. Similarly, the invention provides use of a reagent for carrying out the methods making use of such multipartite construct or a pharmaceutical composition. The invention also provides use of a reagent for the manufacture of a kit or reagent for carrying out the methods making use of such multipartite construct or a pharmaceutical composition. The invention further contemplates use of a reagent for the manufacture of a medicament for carrying out the method methods making use of such multipartite construct or a pharmaceutical composition. In such kits or uses, the reagent may comprise a multipartite construct or a pharmaceutical composition provided by the invention, e.g., as described above.

[0054] As described above, the invention provides methods and compositions useful for analysis, detection, characterization, imaging, and treatment of various diseases and disorders. In various embodiments, the disease or disorder comprises a cancer, a premalignant condition, an inflammatory disease, an immune disease, an autoimmune disease or disorder, a cardiovascular disease or disorder, neurological disease or disorder, infectious disease or pain. The cancer can include without limitation one of acute lymphoblastic leukemia; acute myeloid leukemia; adrenocortical carcinoma; AIDS-related cancers; AIDS-related lymphoma; anal cancer; appendix cancer; astrocytomas; atypical teratoid/rhabdoid tumor; basal cell carcinoma; bladder cancer; brain stem glioma; brain tumor (including brain stem glioma, central nervous system atypical teratoid/rhabdoid tumor, central nervous system embryonal tumors, astrocytomas, craniopharyngioma, ependymoblastoma, ependymoma, medulloblastoma, medulloepithelioma, pineal parenchymal tumors of intermediate differentiation, supratentorial primitive neuroectodermal tumors and pineoblastoma); breast cancer; bronchial tumors; Burkitt lymphoma; cancer of unknown primary site; carcinoid tumor; carcinoma of unknown primary site; central nervous system atypical teratoid/rhabdoid tumor; central nervous system embryonal tumors; cervical cancer; childhood cancers; chordoma; chronic lymphocytic leukemia; chronic myelogenous leukemia; chronic myeloproliferative disorders; colon cancer; colorectal cancer; craniopharyngioma; cutaneous T-cell lymphoma; endocrine pancreas islet cell tumors; endometrial cancer; ependymoblastoma; ependymoma; esophageal cancer; esthesioneuroblastoma; Ewing sarcoma; extracranial germ cell tumor; extragonadal germ cell tumor; extrahepatic bile duct cancer; gallbladder cancer; gastric (stomach) cancer; gastrointestinal carcinoid tumor; gastrointestinal stromal cell tumor; gastrointestinal stromal tumor (GIST); gestational trophoblastic tumor; glioma; hairy cell leukemia; head and neck cancer; heart cancer; Hodgkin lymphoma; hypopharyngeal cancer; intraocular melanoma; islet cell tumors; Kaposi sarcoma; kidney cancer; Langerhans cell histiocytosis; laryngeal cancer; lip cancer; liver cancer; lung cancer; malignant fibrous histiocytoma bone cancer; medulloblastoma; medulloepithelioma; melanoma; Merkel cell carcinoma; Merkel cell skin carcinoma; mesothelioma; metastatic squamous neck cancer with occult primary; mouth cancer; multiple endocrine neoplasia syndromes; multiple myeloma; multiple myeloma/plasma cell neoplasm; mycosis fungoides; myelodysplastic syndromes; myeloproliferative neoplasms; nasal cavity cancer; nasopharyngeal cancer; neuroblastoma; Non-Hodgkin lymphoma; nonmelanoma skin cancer; non-small cell lung cancer; oral cancer; oral cavity cancer; oropharyngeal cancer; osteosarcoma; other brain and spinal cord tumors; ovarian cancer; ovarian epithelial cancer; ovarian germ cell tumor; ovarian low malignant potential tumor; pancreatic cancer; papillomatosis; paranasal sinus cancer; parathyroid cancer; pelvic cancer; penile cancer; pharyngeal cancer; pineal parenchymal tumors of intermediate differentiation; pineoblastoma; pituitary tumor; plasma cell neoplasm/multiple myeloma; pleuropulmonary blastoma; primary central nervous system (CNS) lymphoma; primary hepatocellular liver cancer; prostate cancer; rectal cancer; renal cancer; renal cell (kidney) cancer; renal cell cancer; respiratory tract cancer; retinoblastoma; rhabdomyosarcoma; salivary gland cancer; Sezary syndrome; small cell lung cancer; small intestine cancer; soft tissue sarcoma; squamous cell carcinoma; squamous neck cancer; stomach (gastric) cancer; supratentorial primitive neuroectodermal tumors; T-cell lymphoma; testicular cancer; throat cancer; thymic carcinoma; thymoma; thyroid cancer; transitional cell cancer; transitional cell cancer of the renal pelvis and ureter; trophoblastic tumor; ureter cancer; urethral cancer; uterine cancer; uterine sarcoma; vaginal cancer; vulvar cancer; Waldenstrom macroglobulinemia; or Wilm's tumor. The premalignant condition can include without limitation Barrett's Esophagus. The autoimmune disease can include without limitation one of inflammatory bowel disease (IBD), Crohn's disease (CD), ulcerative colitis (UC), pelvic inflammation, vasculitis, psoriasis, diabetes, autoimmune hepatitis, multiple sclerosis, myasthenia gravis, Type I diabetes, rheumatoid arthritis, psoriasis, systemic lupus erythematosis (SLE), Hashimoto's Thyroiditis, Grave's disease, Ankylosing Spondylitis Sjogrens Disease, CREST syndrome, Scleroderma, Rheumatic Disease, organ rejection, Primary Sclerosing Cholangitis, or sepsis. The cardiovascular disease can include without limitation one of atherosclerosis, congestive heart failure, vulnerable plaque, stroke, ischemia, high blood pressure, stenosis, vessel occlusion or a thrombotic event. The neurological disease can include without limitation one of Multiple Sclerosis (MS), Parkinson's Disease (PD), Alzheimer's Disease (AD), schizophrenia, bipolar disorder, depression, autism, Prion Disease, Pick's disease, dementia, Huntington disease (HD), Down's syndrome, cerebrovascular disease, Rasmussen's encephalitis, viral meningitis, neurospsychiatric systemic lupus erythematosus (NPSLE), amyotrophic lateral sclerosis, Creutzfeldt-Jacob disease, Gerstmann-Straussler-Scheinker disease, transmissible spongiform encephalopathy, ischemic reperfusion damage (e.g. stroke), brain trauma, microbial infection, or chronic fatigue syndrome. The pain can include without limitation one of fibromyalgia, chronic neuropathic pain, or peripheral neuropathic pain. The infectious disease can include without limitation one of a bacterial infection, viral infection, yeast infection, Whipple's Disease, Prion Disease, cirrhosis, methicillin-resistant Staphylococcus aureus, HIV, Hepatitis C virus (HCV), Epstein Barr virus, Helicobacter pylori, hepatitis, syphilis, meningitis, malaria, tuberculosis, or influenza.

### BRIEF DESCRIPTION OF THE DRAWINGS

[0055] FIG. 1 illustrates a competitive assay selection strategy: the random pool of aptamer (the library) is incubated with the target protein, in this case, EpCAM. After washing and elution from the target, the eluted aptamers are again added to the target and allowed to bind. The antibody is then added to the reaction, competing with the aptamers at the epitope of the antibody. The aptamers displaced by the antibody are then collected.

[0056] FIGS. 2A-2F illustrate methods of assessing biomarkers such as microvesicle surface antigens. FIG. 2A is a schematic of a planar substrate coated with a capture agent, such as an aptamer or antibody, which captures vesicles expressing the target antigen of the capture agent. The capture agent may bind a protein expressed on the surface of vesicles shed from diseased cells (“disease vesicle”). The detection agent, which may also be an aptamer or antibody, carries a detectable label, here a fluorescent signal. The detection agent binds to the captured vesicle and provides a detectable signal via its fluorescent label. The detection agent can detect an antigen that is generally associated with vesicles, or is associated with a cell-of-origin or a disease, e.g., a cancer. FIG. 2B is a schematic of a particle bead conjugated with a capture agent, which captures vesicles expressing the target antigen of the capture agent. The capture agent may bind a protein expressed on the surface of vesicles shed from diseased cells (“disease vesicle”). The detection agent, which may also be an aptamer or antibody, carries a detectable label, here a fluorescent signal. The detection agent binds to the captured vesicle and provides a detectable signal via its fluorescent label. The detection agent can detect an antigen that is generally associated with vesicles, or is associated with a cell-of-origin or a disease, e.g., a cancer. FIG. 2C is an example of a screening scheme that can be performed by using different combinations of capture and detection agents to the indicated biomarkers. The biomarker combinations can be detected using assays as shown in FIGS. 2A-2B. FIGS. 2D-2E present illustrative schemes for capturing and detecting vesicles to characterize a phenotype. FIG. 2F presents illustrative schemes for assessing vesicle payload to characterize a phenotype.

[0057] FIGS. 3A-B illustrates a non-limiting example of an aptamer nucleotide sequence and its secondary structure. FIG. 3A illustrates a secondary structure of a 32-mer oligonucleotide, Aptamer 4, with sequence 5′-CCCCCCGAATCACATGACTTGGGCGGGGGTCG (SEQ ID NO. 1). In the figure, the sequence is shown with 6 thymine nucleotides added to the end, which can act as a spacer to attach a biotin molecule. This particular oligo has a high binding affinity to the target, EpCAM (see Table 4). Additional candidate EpCAM binders are identified by modeling the entire database of sequenced oligos to the secondary structure of this oligo. FIG. 3B illustrates another 32-mer oligo with sequence 5′-ACCGGATAGCGGTTGGAGGCGTGCTCCACTCG (SEQ ID NO. 2) that has a different secondary structure than the aptamer in FIG. 3A. This aptamer is also shown with a 6-thymine tail.

[0058] FIG. 4 illustrates a process for producing a target-specific set of aptamers using a cell subtraction method, wherein the target is a biomarker associated with a specific disease. In Step 1, a random pool of oligonucleotides are contacted with a biological sample from a normal patient. In Step 2, the oligos that did not bind in Step 1 are added to a biological sample isolated from diseased patients. The bound oligos from this step are then eluted, captured via their biotin linkage and then combined again with normal biological sample. The unbound oligos are then added again to disease-derived biological sample and isolated. This process can be repeated iteratively. The final eluted aptamers are tested against patient samples to measure the sensitivity and specificity of the set. Biological samples can include blood, including plasma or serum, or other components of the circulatory system, such as microvesicles.

[0059] FIG. 5 illustrates results from a binding assay showing the binding affinity of an exemplary aptamer (Aptamer ID BTX176881 (SEQ ID NO: 3)) to the target EpCAM protein at various target concentrations. The aptamer to be tested is fixed to a substrate using a biotin tail and is incubated with various concentrations of target (125, 250 and 500 nM). The test is performed on a surface plasmon resonance machine (SPR). The SPR machine detects association and disassociation of the aptamer and the target. Target is applied until the association and disassociation events are equal, resulting in a plateau of the curve. The equations describing the curve at each concentration can then be used to calculate the K_{D} of the aptamer (see Table 4).

[0060] FIGS. 6A-D illustrate the use of an anti-EpCAM aptamer (Aptamer 4; SEQ ID NO. 1) to detect a microvesicle population. Vesicles in patient plasma samples were captured using bead-conjugated antibodies to the indicated microvesicle surface antigens: A) EGFR; B) PBP; C) EpCAM; D) KLK2. Fluorescently labeled Aptamer 4 was used as a detector in the microbead assay. The figure shows average median fluorescence values (MFI values) for three cancer (C1-C3) and three normal samples (N1-N3) in each plot. In each plot, the samples from left to right are ordered as: C1, C2, C3, N1, N2, N3.

[0061] FIG. 7 comprises a schematic for identifying a target of a selected aptamer, such as an aptamer selected by the process of the invention. The figure shows a binding agent 702, here an aptamer for purposes of illustration, tethered to a substrate 701. The binding agent 702 can be covalently attached to substrate 701. The binding agent 702 may also be non-covalently attached. For example, binding agent 702 can comprise a label which can be attracted to the substrate, such as a biotin group which can form a complex with an avidin/streptavidin molecule that is covalently attached to the substrate. The binding agent 702 binds to a surface antigen 703 of microvesicle 704. In the step signified by arrow (i), the microvesicle is disrupted while leaving the complex between the binding agent 702 and surface antigen 703 intact. Disrupted microvesicle 705 is removed, e.g., via washing or buffer exchange, in the step signified by arrow (ii). In the step signified by arrow (iii), the surface antigen 703 is released from the binding agent 702. The surface antigen 703 can be analyzed to determine its identity.

[0062] FIGS. 8A-8G illustrate using an oligonucleotide probe library to differentiate cancer and non-cancer samples.

[0063] FIG. 9 shows protein targets of oligonucleotide probes run on a silver stained SDS-PAGE gel.

[0064] FIGS. 10A-G illustrate use of oligonucleotides that differentiate microvesicles in breast cancer plasma from normal controls.

[0065] FIGS. 11A-B illustrate a model generated using a training (FIG. 11A) and test (FIG. 11B) set from a round of cross validation. The AUC for the test set was 0.803. Another exemplary round of cross-validation is shown in FIGS. 11C-D with training (FIG. 11C) and test (FIG. 11D) sets. The AUC for the test set was 0.678.

[0066] FIGS. 12A-C illustrate use of aptamers in methods of characterizing a phenotype. FIG. 12A is a schematic 1200 showing an assay configuration that can be used to detect and/or quantify a target of interest. In the figure, capture aptamer 1202 is attached to substrate 1201. Target of interest 1203 is bound by capture aptamer 1202. Detection aptamer 1204 is also bound to target of interest 1203. Detection aptamer 1204 carries label 1205 which can be detected to identify target captured to substrate 1201 via capture aptamer 1202. FIG. 12B is a schematic 1210 showing use of an aptamer pool to characterize a phenotype. A pool of aptamers to a target of interest is provided 1211. The pool is contacted with a test sample to be characterized 1212. The mixture is washed to remove unbound aptamers. The remaining aptamers are disassociated and collected 1213. The collected aptamers are identified 1214 and the identity of the retained aptamers is used to characterize the phenotype 1215. FIG. 12C is a schematic 1220 showing an implementation of the method in FIG. 12B. A pool of aptamers identified as binding a microvesicle population is provided 1219. The input sample comprises microvesicles that are isolated from a test sample 1220. The pool is contacted with the isolated microvesicles to be characterized 1223.

[0067] The mixture is washed to remove unbound aptamers and the remaining aptamers are disassociated and collected 1225. The collected aptamers are identified and the identity of the retained aptamers is used to characterize the phenotype 1226.

[0068] FIGS. 13A-I illustrate development and use of an oligonucleotide probe library to distinguish biological sample types.

[0069] FIGS. 14A-C illustrate enriching a naïve oligonucleotide library with balanced design for oligonucleotides that differentiate between breast cancer and non-cancer microvesicles derived from plasma samples.

[0070] FIGS. 15A-D shows characterization of breast cancer samples as cancer or non-cancer using two different but related oligonucleotide probe libraries.

[0071] FIGS. 16A-E illustrate oligonucleotide constructs that recognize immunomodulatory (IMD) targets.

[0072] FIGS. 17A-C illustrate identification of oligonucleotides that recognize C1q and other targets.

[0073] FIGS. 18A-G illustrate identification of targets of aptamer C10.36 (SEQ ID NO. 4357).

[0074] FIGS. 19A-E illustrate cell killing by aptamer C10.36 (SEQ ID NO. 4357).

[0075] FIGS. 20A-H illustrate cell killing by aptamer C10.36 (SEQ ID NO. 4357).

[0076] FIGS. 21A-B illustrate proteins that affinity purify with aptamer C10.36 in various cell lines.

[0077] FIG. 22 shows an analysis of gene expression in cells treated with or without aptamer C10.36.

[0078] FIGS. 23A-L illustrate B-cell lymphoma specific aptamer C10.36 binding a ribonucleoprotein.

[0079] FIGS. 24A-B show cellular internalization of aptamer C10.36. FIG. 24A: C10.36 binds to Ramos and Jurkat cells but is only internalized by Ramos. FIG. 24B: Mβcd inhibits C10.36 internalization in Ramos cells.

[0080] FIGS. 25A-B show that C10.36 internalization leads to changes in splicing in Ramos cells. FIG. 25A: C10.36 treatment leads to alternative splicing at 24 hours. STRING network map of alternatively spliced genes indicates global impact on splicing regulation following C10.36 binding and internalization. FIG. 25B: Alternatively spliced exons were located in the 5′ and 3′ terminals of genes. The majority of the alternatively spliced exons were located in the 5′ and 3′ terminals of genes indicating differential usage of alternative polyadenylation (APA) sites following C10.36 treatment.

[0081] FIGS. 26A-D show that C10.36 treatment inhibits proliferation of Ramos cells by necrosis. FIG. 26A: C10.36 treatment does not lead to caspase dependent apoptosis. FIG. 26B: C10.36 mediated loss in viability is most likely due to necrosis. FIG. 26C: C10.36 treatment does not lead autophagy mediated cell death. FIG. 26D: C10.36 treatment leads to formation of necrotic blebs.

[0082] FIGS. 27A-D shows that C10.36 binding and internalization play a role in cell death. MEC1 cells do not internalize C10.36 upon binding unlike Ramos 2G6.4 C10 (FIG. 27A) or SUDHL-1 (FIG. 27B).

[0083] FIGS. 27C-27D show that an anti-hnRNP U monoclonal antibody did not effect Ramos cell proliferation (FIG. 27D), unlike C10.36 under similar conditions (FIG. 27C).

[0084] FIG. 28 shows cellular internalization of C10.36-nanoparticles.

[0085] FIGS. 29A-D show characterization of C10.36 resistant Ramos cells.

[0086] FIG. 30 shows binding of C10.36 to human peripheral blood mononuclear cells (PBMCs).

### DETAILED DESCRIPTION OF THE INVENTION

[0087] The details of one or more embodiments of the invention are set forth in the accompanying description below. Although any methods and materials similar or equivalent to those described herein can be used in the practice or testing of the present invention, the preferred methods and materials are now described. Other features, objects, and advantages of the invention will be apparent from the description. In the specification, the singular forms also include the plural unless the context clearly dictates otherwise. Unless defined otherwise, all technical and scientific terms used herein have the same meaning as commonly understood by one of ordinary skill in the art to which this invention belongs. In the case of conflict, the present Specification will control.

[0088] Disclosed herein are compositions and methods that can be used to assess a biomarker profile, which can include a presence or level of one or more biomarkers. The compositions and methods of the invention comprise the use of oligonucleotide probes (aptamers) that bind target biomarkers. The biomarkers may comprise proteins or polypeptides but can be any useful component displayed on a cell or microvesicle surface including nucleic acids, lipids and/or carbohydrates. In general, the oligonucleotides disclosed are synthetic nucleic acid molecules, including DNA and RNA, and variations thereof. Unless otherwise specified, the oligonucleotide probes can be synthesized in DNA or RNA format or as hybrid molecules as desired. The methods disclosed comprise diagnostic processes and techniques using one or more aptamer of the invention, to determine the level or presence of relevant microvesicle surface antigens or a functional fragment thereof. Alternatively, an oligonucleotide probe of the invention can also be used as a binding agent to capture, isolate, or enrich, a cell, cell fragment, vesicle or any other fragment or complex that comprises the antigen or functional fragments thereof.

[0089] The compositions and methods of the invention comprise individual oligonucleotides that are identified for use in assessing a biomarker profile. The invention further discloses compositions and methods of oligonucleotide pools that can be used to detect a biomarker profile in a given sample.

[0090] Oligonucleotide probes and sequences disclosed in the compositions and methods of the invention may be identified herein in the form of DNA or RNA. Unless otherwise specified, one of skill in the art will appreciate that an oligonucleotide may generally be synthesized as either form of nucleic acid and carry various chemical modifications and remain within the scope of the invention. The term aptamer may be used in the art to refer to a single oligonucleotide that binds specifically to a target of interest through mechanisms other than Watson crick base pairing, similar to binding of a monoclonal antibody to a particular antigen. Within the scope of this disclosure and unless stated explicitly or otherwise implicit in context, the terms aptamer, oligonucleotide and oligonucleotide probe, and variations thereof, may be used interchangeably to refer to an oligonucleotide capable of distinguishing biological entities of interest (e.g., biomarkers) whether or not the specific entity has been identified or whether the precise mode of binding has been determined.

[0091] An oligonucleotide probe of the invention can also be used to provide in vitro or in vivo detection or imaging, to provide any appropriate diagnostic readout (e.g., diagnostic, prognostic or theranostic). Separately, an oligonucleotide probe of the invention can also be used for treatment or as a therapeutic to specifically target a cell, tissue or organ.

### Aptamers

[0092] SELEX. A suitable method for generating an aptamer is with the process entitled “Systematic Evolution of Ligands by Exponential Enrichment” (“SELEX”) generally described in, e.g., U.S. patent application Ser. No. 07/536,428, filed Jun. 11, 1990, now abandoned, U.S. Pat. No. 5,475,096 entitled “Nucleic Acid Ligands”, and U.S. Pat. No. 5,270,163 (see also WO 91/19813) entitled “Nucleic Acid Ligands”. Each SELEX-identified nucleic acid ligand, i.e., each aptamer, is a specific ligand of a given target compound or molecule. The SELEX process is based on the unique insight that nucleic acids have sufficient capacity for forming a variety of two- and three-dimensional structures and sufficient chemical versatility available within their monomers to act as ligands (i.e., form specific binding pairs) with virtually any chemical compound, whether monomeric or polymeric. Molecules of any size or composition can serve as targets.

[0093] SELEX relies as a starting point upon a large library or pool of single stranded oligonucleotides comprising randomized sequences. The oligonucleotides can be modified or unmodified DNA, RNA, or DNA/RNA hybrids. In some examples, the pool comprises 100% random or partially random oligonucleotides. In other examples, the pool comprises random or partially random oligonucleotides containing at least one fixed and/or conserved sequence incorporated within randomized sequence. In other examples, the pool comprises random or partially random oligonucleotides containing at least one fixed and/or conserved sequence at its 5′ and/or 3′ end which may comprise a sequence shared by all the molecules of the oligonucleotide pool. Fixed sequences are sequences such as hybridization sites for PCR primers, promoter sequences for RNA polymerases (e.g., T3, T4, T7, and SP6), restriction sites, or homopolymeric sequences, such as poly A or poly T tracts, catalytic cores, sites for selective binding to affinity columns, and other sequences to facilitate cloning and/or sequencing of an oligonucleotide of interest. Conserved sequences are sequences, other than the previously described fixed sequences, shared by a number of aptamers that bind to the same target.

[0094] The oligonucleotides of the pool preferably include a randomized sequence portion as well as fixed sequences necessary for efficient amplification. Typically the oligonucleotides of the starting pool contain fixed 5′ and 3′ terminal sequences which flank an internal region of 30-50 random nucleotides. The randomized nucleotides can be produced in a number of ways including chemical synthesis and size selection from randomly cleaved cellular nucleic acids. Sequence variation in test nucleic acids can also be introduced or increased by mutagenesis before or during the selection/amplification iterations.

[0095] The random sequence portion of the oligonucleotide can be of any length and can comprise ribonucleotides and/or deoxyribonucleotides and can include modified or non-natural nucleotides or nucleotide analogs. See, e.g. U.S. Pat. Nos. 5,958,691; 5,660,985; 5,958,691; 5,698,687; 5,817,635; 5,672,695, and PCT Publication WO 92/07065. Random oligonucleotides can be synthesized from phosphodiester-linked nucleotides using solid phase oligonucleotide synthesis techniques well known in the art. See, e.g., Froehler et al., Nucl. Acid Res. 14:5399-5467 (1986) and Froehler et al., Tet. Lett. 27:5575-5578 (1986). Random oligonucleotides can also be synthesized using solution phase methods such as triester synthesis methods. See, e.g., Sood et al., Nucl. Acid Res. 4:2557 (1977) and Hirose et al., Tet. Lett., 28:2449 (1978). Typical syntheses carried out on automated DNA synthesis equipment yield 10¹⁴-10¹⁶ individual molecules, a number sufficient for most SELEX experiments. Sufficiently large regions of random sequence in the sequence design increases the likelihood that each synthesized molecule is likely to represent a unique sequence.

[0096] The starting library of oligonucleotides may be generated by automated chemical synthesis on a DNA synthesizer. To synthesize randomized sequences, mixtures of all four nucleotides are added at each nucleotide addition step during the synthesis process, allowing for random incorporation of nucleotides.

[0097] As stated above, in one embodiment, random oligonucleotides comprise entirely random sequences; however, in other embodiments, random oligonucleotides can comprise stretches of nonrandom or partially random sequences. Partially random sequences can be created by adding the four nucleotides in different molar ratios at each addition step.

[0098] The starting library of oligonucleotides may be for example, RNA, DNA, or RNA/DNA hybrid. In those instances where an RNA library is to be used as the starting library it is typically generated by transcribing a DNA library in vitro using T7 RNA polymerase or modified T7 RNA polymerases and purified. The library is then mixed with the target under conditions favorable for binding and subjected to step-wise iterations of binding, partitioning and amplification, using the same general selection scheme, to achieve virtually any desired criterion of binding affinity and selectivity. More specifically, starting with a mixture containing the starting pool of nucleic acids, the SELEX method includes steps of: (a) contacting the mixture with the target under conditions favorable for binding; (b) partitioning unbound nucleic acids from those nucleic acids which have bound specifically to target molecules; (c) dissociating the nucleic acid-target complexes; (d) amplifying the nucleic acids dissociated from the nucleic acid-target complexes to yield a ligand-enriched mixture of nucleic acids; and (e) reiterating the steps of binding, partitioning, dissociating and amplifying through as many cycles as desired to yield highly specific, high affinity nucleic acid ligands to the target molecule. In those instances where RNA aptamers are being selected, the SELEX method further comprises the steps of: (i) reverse transcribing the nucleic acids dissociated from the nucleic acid-target complexes before amplification in step (d); and (ii) transcribing the amplified nucleic acids from step (d) before restarting the process.

[0099] Within a nucleic acid mixture containing a large number of possible sequences and structures, there is a wide range of binding affinities for a given target. A nucleic acid mixture comprising, for example, a 20 nucleotide randomized segment can have 4²⁰ candidate possibilities. Those which have the higher affinity constants for the target are most likely to bind to the target. After partitioning, dissociation and amplification, a second nucleic acid mixture is generated, enriched for the higher binding affinity candidates. Additional rounds of selection progressively favor better ligands until the resulting nucleic acid mixture is predominantly composed of only one or a few sequences. These can then be cloned, sequenced and individually tested for binding affinity as pure ligands or aptamers.

[0100] Cycles of selection and amplification are repeated until a desired goal is achieved. In the most general case, selection/amplification is continued until no significant improvement in binding strength is achieved on repetition of the cycle. The method is typically used to sample approximately 10¹⁴ different nucleic acid species but may be used to sample as many as about 10¹⁸ different nucleic acid species. Generally, nucleic acid aptamer molecules are selected in a 5 to 20 cycle procedure. In one embodiment, heterogeneity is introduced only in the initial selection stages and does not occur throughout the replicating process.

[0101] In one embodiment of SELEX, the selection process is so efficient at isolating those nucleic acid ligands that bind most strongly to the selected target, that only one cycle of selection and amplification is required. Such an efficient selection may occur, for example, in a chromatographic-type process wherein the ability of nucleic acids to associate with targets bound on a column operates in such a manner that the column is sufficiently able to allow separation and isolation of the highest affinity nucleic acid ligands.

[0102] In many cases, it is not necessarily desirable to perform the iterative steps of SELEX until a single nucleic acid ligand is identified. The target-specific nucleic acid ligand solution may include a family of nucleic acid structures or motifs that have a number of conserved sequences and a number of sequences which can be substituted or added without significantly affecting the affinity of the nucleic acid ligands to the target. By terminating the SELEX process prior to completion, it is possible to determine the sequence of a number of members of the nucleic acid ligand solution family. The invention provides for the identification of aptamer pools and uses thereof that jointly can be used to characterize a test sample. For example, the aptamer pools can be identified through rounds of positive and negative selection to identify microvesicle indicative of a disease or condition. The invention further provides use of such aptamer pools to detect and/or quantify such microvesicles in a sample, thereby allowing a diagnosis, prognosis or theranosis to be provided.

[0103] A variety of nucleic acid primary, secondary and tertiary structures are known to exist. The structures or motifs that have been shown most commonly to be involved in non-Watson-Crick type interactions are referred to as hairpin loops, symmetric and asymmetric bulges, pseudoknots and myriad combinations of the same. Almost all known cases of such motifs suggest that they can be formed in a nucleic acid sequence of no more than 30 nucleotides. For this reason, it is often preferred that SELEX procedures with contiguous randomized segments be initiated with nucleic acid sequences containing a randomized segment of between about 20 to about 50 nucleotides and in some embodiments, about 30 to about 40 nucleotides. In one example, the 5′-fixed:random:3′-fixed sequence comprises a random sequence of about 30 to about 50 nucleotides.

[0104] The core SELEX method has been modified to achieve a number of specific objectives. For example, U.S. Pat. No. 5,707,796 describes the use of SELEX in conjunction with gel electrophoresis to select nucleic acid molecules with specific structural characteristics, such as bent DNA. U.S. Pat. No. 5,763,177 describes SELEX based methods for selecting nucleic acid ligands containing photoreactive groups capable of binding and/or photocrosslinking to and/or photoinactivating a target molecule. U.S. Pat. Nos. 5,567,588 and 5,861,254 describe SELEX based methods which achieve highly efficient partitioning between oligonucleotides having high and low affinity for a target molecule. U.S. Pat. No. 5,496,938 describes methods for obtaining improved nucleic acid ligands after the SELEX process has been performed. U.S. Pat. No. 5,705,337 describes methods for covalently linking a ligand to its target.

[0105] SELEX can also be used to obtain nucleic acid ligands that bind to more than one site on the target molecule, and to obtain nucleic acid ligands that include non-nucleic acid species that bind to specific sites on the target. SELEX provides means for isolating and identifying nucleic acid ligands which bind to any envisionable target, including large and small biomolecules such as nucleic acid-binding proteins and proteins not known to bind nucleic acids as part of their biological function as well as lipids, cofactors and other small molecules. For example, U.S. Pat. No. 5,580,737 discloses nucleic acid sequences identified through SELEX which are capable of binding with high affinity to caffeine and the closely related analog, theophylline.

[0106] Counter-SELEX is a method for improving the specificity of nucleic acid ligands to a target molecule by eliminating nucleic acid ligand sequences with cross-reactivity to one or more non-target molecules. Counter-SELEX is comprised of the steps of: (a) preparing a candidate mixture of nucleic acids; (b) contacting the candidate mixture with the target, wherein nucleic acids having an increased affinity to the target relative to the candidate mixture may be partitioned from the remainder of the candidate mixture; (c) partitioning the increased affinity nucleic acids from the remainder of the candidate mixture; (d) dissociating the increased affinity nucleic acids from the target; e) contacting the increased affinity nucleic acids with one or more non-target molecules such that nucleic acid ligands with specific affinity for the non-target molecule(s) are removed; and (f) amplifying the nucleic acids with specific affinity only to the target molecule to yield a mixture of nucleic acids enriched for nucleic acid sequences with a relatively higher affinity and specificity for binding to the target molecule. As described above for SELEX, cycles of selection and amplification are repeated until a desired goal is achieved.

[0107] One potential problem encountered in the use of nucleic acids as therapeutics and vaccines is that oligonucleotides in their phosphodiester form may be quickly degraded in body fluids by intracellular and extracellular enzymes such as endonucleases and exonucleases before the desired effect is manifest. The SELEX method thus encompasses the identification of high-affinity nucleic acid ligands containing modified nucleotides conferring improved characteristics on the ligand, such as improved in vivo stability or improved delivery characteristics. Examples of such modifications include chemical substitutions at the ribose and/or phosphate and/or base positions. SELEX identified nucleic acid ligands containing modified nucleotides are described, e.g., in U.S. Pat. No. 5,660,985, which describes oligonucleotides containing nucleotide derivatives chemically modified at the 2′ position of ribose, 5′ position of pyrimidines, and 8′ position of purines, U.S. Pat. No. 5,756,703 which describes oligonucleotides containing various 2′-modified pyrimidines, and U.S. Pat. No. 5,580,737 which describes highly specific nucleic acid ligands containing one or more nucleotides modified with 2′-amino (2′-NH₂), 2′-fluoro (2′-F), and/or 2′-O-methyl (2′-OMe) substituents.

[0108] Modifications of the nucleic acid ligands contemplated in this invention include, but are not limited to, those which provide other chemical groups that incorporate additional charge, polarizability, hydrophobicity, hydrogen bonding, electrostatic interaction, and fluxionality to the nucleic acid ligand bases or to the nucleic acid ligand as a whole. Modifications to generate oligonucleotide populations which are resistant to nucleases can also include one or more substitute internucleotide linkages, altered sugars, altered bases, or combinations thereof. Such modifications include, but are not limited to, 2′-position sugar modifications, 5-position pyrimidine modifications, 8-position purine modifications, modifications at exocyclic amines, substitution of 4-thiouridine, substitution of 5-bromo or 5-iodo-uracil; backbone modifications, phosphorothioate or allyl phosphate modifications, methylations, and unusual base-pairing combinations such as the isobases isocytidine and isoguanosine. Modifications can also include 3′ and 5′ modifications such as capping.

[0109] In one embodiment, oligonucleotides are provided in which the P(O)O group is replaced by P(O)S (“thioate”), P(S)S (“dithioate”), P(O)NR₂ (“amidate”), P(O)R, P(O)OR′, CO or CH₂ (“formacetal”) or 3′-amine (—NH—CH₂—CH₂—), wherein each R or R′ is independently H or substituted or unsubstituted alkyl. Linkage groups can be attached to adjacent nucleotides through an —O—, —N—, or —S— linkage. Not all linkages in the oligonucleotide are required to be identical. As used herein, the term phosphorothioate encompasses one or more non-bridging oxygen atoms in a phosphodiester bond replaced by one or more sulfur atoms.

[0110] In further embodiments, the oligonucleotides comprise modified sugar groups, for example, one or more of the hydroxyl groups is replaced with halogen, aliphatic groups, or functionalized as ethers or amines. In one embodiment, the 2′-position of the furanose residue is substituted by any of an O-methyl, O-alkyl, O-allyl, S-alkyl, S-allyl, or halo group. Methods of synthesis of 2′-modified sugars are described, e.g., in Sproat, et al., Nucl. Acid Res. 19:733-738 (1991); Cotten, et al., Nucl. Acid Res. 19:2629-2635 (1991); and Hobbs, et al., Biochemistry 12:5138-5145 (1973). Other modifications are known to one of ordinary skill in the art. Such modifications may be pre-SELEX process modifications or post-SELEX process modifications (modification of previously identified unmodified ligands) or may be made by incorporation into the SELEX process.

[0111] Pre-SELEX process modifications or those made by incorporation into the SELEX process yield nucleic acid ligands with both specificity for their SELEX target and improved stability, e.g., in vivo stability. Post-SELEX process modifications made to nucleic acid ligands may result in improved stability, e.g., in vivo stability without adversely affecting the binding capacity of the nucleic acid ligand.

[0112] The SELEX method encompasses combining selected oligonucleotides with other selected oligonucleotides and non-oligonucleotide functional units as described in U.S. Pat. Nos. 5,637,459 and 5,683,867. The SELEX method further encompasses combining selected nucleic acid ligands with lipophilic or non-immunogenic high molecular weight compounds in a diagnostic or therapeutic complex, as described, e.g., in U.S. Pat. Nos. 6,011,020, 6,051,698, and PCT Publication No. WO 98/18480. These patents and applications teach the combination of a broad array of shapes and other properties, with the efficient amplification and replication properties of oligonucleotides, and with the desirable properties of other molecules.

[0113] The identification of nucleic acid ligands to small, flexible peptides via the SELEX method has also been explored. Small peptides have flexible structures and usually exist in solution in an equilibrium of multiple conformers, and thus it was initially thought that binding affinities may be limited by the conformational entropy lost upon binding a flexible peptide. However, the feasibility of identifying nucleic acid ligands to small peptides in solution was demonstrated in U.S. Pat. No. 5,648,214. In this patent, high affinity RNA nucleic acid ligands to substance P, an 11 amino acid peptide, were identified.

[0114] The aptamers with specificity and binding affinity to the target(s) of the present invention can be selected by the SELEX N process as described herein. As part of the SELEX process, the sequences selected to bind to the target are then optionally minimized to determine the minimal sequence having the desired binding affinity. The selected sequences and/or the minimized sequences are optionally optimized by performing random or directed mutagenesis of the sequence to increase binding affinity or alternatively to determine which positions in the sequence are essential for binding activity. Additionally, selections can be performed with sequences incorporating modified nucleotides to stabilize the aptamer molecules against degradation in vivo.

[0115] 2′ Modified SELEX

[0116] For an aptamer to be suitable for use as a therapeutic, it is preferably inexpensive to synthesize, and safe and stable in vivo. Wild-type RNA and DNA aptamers are typically not stable is vivo because of their susceptibility to degradation by nucleases. Resistance to nuclease degradation can be greatly increased by the incorporation of modifying groups at the 2′-position.

[0117] Fluoro and amino groups have been successfully incorporated into oligonucleotide pools from which aptamers have been subsequently selected. However, these modifications greatly increase the cost of synthesis of the resultant aptamer, and may introduce safety concerns in some cases because of the possibility that the modified nucleotides could be recycled into host DNA by degradation of the modified oligonucleotides and subsequent use of the nucleotides as substrates for DNA synthesis.

[0118] Aptamers that contain 2′-O-methyl (“2′-OMe”) nucleotides, as provided herein, may overcome one or more potential drawbacks. Oligonucleotides containing 2′-OMe nucleotides are nuclease-resistant and inexpensive to synthesize. Although 2′-OMe nucleotides are ubiquitous in biological systems, natural polymerases do not accept 2′-OMe NTPs as substrates under physiological conditions, thus there are no safety concerns over the recycling of 2′-OMe nucleotides into host DNA. The SELEX method used to generate 2′-modified aptamers is described, e.g., in U.S. Provisional Patent Application Ser. No. 60/430,761, filed Dec. 3, 2002, U.S. Provisional Patent Application Ser. No. 60/487,474, filed Jul. 15, 2003, U.S. Provisional Patent Application Ser. No. 60/517,039, filed Nov. 4, 2003, U.S. patent application Ser. No. 10/729,581, filed Dec. 3, 2003, and U.S. patent application Ser. No. 10/873,856, filed Jun. 21, 2004, entitled “Method for in vitro Selection of 2′-O-methyl substituted Nucleic Acids”, each of which is herein incorporated by reference in its entirety.

### Methods

[0119] Biomarker Detection and Diagnostics

[0120] The aptamers of the invention can be used in various methods to assess presence or level of biomarkers in a biological sample, e.g., biological entities of interest such as proteins, nucleic acids, or microvesicles. The aptamer functions as a binding agent to assess presence or level of the cognate target molecule. Therefore, in various embodiments of the invention directed to diagnostics, prognostics or theranostics, one or more aptamers of the invention are configured in a ligand-target based assay, where one or more aptamer of the invention is contacted with a selected biological sample, where the or more aptamer associates with or binds to its target molecules. Aptamers of the invention are used to identify candidate biosignatures based on the biological samples assessed and biomarkers detected. In further embodiments, aptamers may themselves provide a biosignature for a particular condition or disease. A biosignature refers to a biomarker profile of a biological sample comprising a presence, level or other characteristic that can be assessed (including without limitation a sequence, mutation, rearrangement, translocation, deletion, epigenetic modification, methylation, post-translational modification, allele, activity, complex partners, stability, half life, and the like) of one or more biomarker of interest. Biosignatures can be used to evaluate diagnostic and/or prognostic criteria such as presence of disease, disease staging, disease monitoring, disease stratification, or surveillance for detection, metastasis or recurrence or progression of disease. For example, methods of the invention using aptamers against microvesicle surface antigen are useful for correlating a biosignature comprising microvesicle antigens to a selected condition or disease. A biosignature can also be used clinically in making decisions concerning treatment modalities including therapeutic intervention. A biosignature can further be used clinically to make treatment decisions, including whether to perform surgery or what treatment standards should be used along with surgery (e.g., either pre-surgery or post-surgery). As an illustrative example, a biosignature of circulating biomarkers that indicates an aggressive form of cancer may call for a more aggressive surgical procedure and/or more aggressive therapeutic regimen to treat the patient.

[0121] A biosignature can be used in any methods disclosed herein, e.g., to assess whether a subject is afflicted with disease, is at risk for developing disease or to assess the stage or progression of the disease. For example, a biosignature can be used to assess whether a subject has prostate cancer, colon cancer, or other cancer as described herein. Furthermore, a biosignature can be used to determine a stage of a disease or condition, such as colon cancer. The biosignature/biomarker profile comprising a microvesicle can include assessment of payload within the microvesicle. For example, one or more aptamer of the invention can be used to capture a microvesicle population, thereby providing readout of microvesicle antigens, and then the payload content within the captured microvesicles can be assessed, thereby providing further biomarker readout of the payload content.

[0122] A biosignature for characterizing a phenotype may comprise any number of useful criteria. As described further below, the term “phenotype” as used herein can mean any trait or characteristic that is attributed to a biosignature/biomarker profile. A phenotype can be detected or identified in part or in whole using the compositions and/or methods of the invention. In some embodiments, at least one criterion is used for each biomarker. In some embodiments, at least 1, 2, 3, 4, 5, 6, 7, 8, 9, 10, 15, 20, 30, 40, 50, 60, 70, 80, 90 or at least 100 criteria are used. For example, for the characterizing of a cancer, a number of different criteria can be used when the subject is diagnosed with a cancer: 1) if the amount of microRNA in a sample from a subject is higher than a reference value; 2) if the amount of a microRNA within cell type specific vesicles (i.e. vesicles derived from a specific tissue or organ) is higher than a reference value; or 3) if the amount of microRNA within vesicles with one or more cancer specific biomarkers is higher than a reference value. Similar rules can apply if the amount of microRNA is less than or the same as the reference. The method can further include a quality control measure, such that the results are provided for the subject if the samples meet the quality control measure. In some embodiments, if the criteria are met but the quality control is questionable, the subject is reassessed.

[0123] Theranostics

[0124] A biosignature can be used in therapy related diagnostics to provide tests useful to diagnose a disease or choose the correct treatment regimen, such as provide a theranosis. Theranostics includes diagnostic testing that provides the ability to affect therapy or treatment of a diseased state. Theranostics testing provides a theranosis in a similar manner that diagnostics or prognostic testing provides a diagnosis or prognosis, respectively. As used herein, theranostics encompasses any desired form of therapy related testing, including predictive medicine, personalized medicine, integrated medicine, pharmacodiagnostics and Dx/Rx partnering. Therapy related tests can be used to predict and assess drug response in individual subjects, i.e., to provide personalized medicine. Predicting a drug response can be determining whether a subject is a likely responder or a likely non-responder to a candidate therapeutic agent, e.g., before the subject has been exposed or otherwise treated with the treatment. Assessing a drug response can be monitoring a response to a drug, e.g., monitoring the subject's improvement or lack thereof over a time course after initiating the treatment. Therapy related tests are useful to select a subject for treatment who is particularly likely to benefit from the treatment or to provide an early and objective indication of treatment efficacy in an individual subject. Thus, a biosignature as disclosed herein may indicate that treatment should be altered to select a more promising treatment, thereby avoiding the great expense of delaying beneficial treatment and avoiding the financial and morbidity costs of administering an ineffective drug(s).

[0125] The compositions and methods of the invention can be used to identify or detect a biosignature associated with a variety of diseases and disorders, which include, but are not limited to cardiovascular disease, cancer, infectious diseases, sepsis, neurological diseases, central nervous system related diseases, endovascular related diseases, and autoimmune related diseases. Therapy related diagnostics (i.e., theranostics) are also useful in clinical diagnosis and management of many such diseases and disorders. Therapy related diagnostics also aid in the prediction of drug toxicity, drug resistance or drug response. Therapy related tests may be developed in any suitable diagnostic testing format, which include, but are not limited to, e.g., immunohistochemical tests, clinical chemistry, immunoassay, cell-based technologies, nucleic acid tests or body imaging methods. Therapy related tests can further include but are not limited to, testing that aids in the determination of therapy, testing that monitors for therapeutic toxicity, or response to therapy testing. Thus, a biosignature can be used to predict or monitor a subject's response to a treatment. A biosignature can be determined at different time points for a subject after initiating, removing, or altering a particular treatment.

[0126] In some embodiments, the compositions and methods of the invention provide for a determination or prediction as to whether a subject is responding to a treatment is made based on a change in the amount of one or more components of a biosignature (i.e., the microRNA, vesicles and/or biomarkers of interest), an amount of one or more components of a particular biosignature, or the biosignature detected for the components. In another embodiment, a subject's condition is monitored by determining a biosignature at different time points. The progression, regression, or recurrence of a condition is determined. Response to therapy can also be measured over a time course. Thus, the invention provides a method of monitoring a status of a disease or other medical condition in a subject, comprising isolating or detecting a biosignature from a biological sample from the subject, detecting the overall amount of the components of a particular biosignature, or detecting the biosignature of one or more components (such as the presence, absence, or expression level of a biomarker). The biosignatures are used to monitor the status of the disease or condition.

[0127] One or more novel biosignatures of a vesicle can also be identified. For example, one or more vesicles can be isolated from a subject that responds to a drug treatment or treatment regimen and compared to a reference, such as another subject that does not respond to the drug treatment or treatment regimen. Differences between the biosignatures can be determined and used to identify other subjects as responders or non-responders to a particular drug or treatment regimen.

[0128] In some embodiments, a biosignature is used to determine whether a particular disease or condition is resistant to a drug, in which case a physician need not waste valuable time with such drug treatment. To obtain early validation of a drug choice or treatment regimen, a biosignature is determined for a sample obtained from a subject. The biosignature is used to assess whether the particular subject's disease has the biomarker associated with drug resistance. Such a determination enables doctors to devote critical time as well as the patient's financial resources to effective treatments.

[0129] Biosignatures can be used in the theranosis of a cancer, such as identifying whether a subject suffering from cancer is a likely responder or non-responder to a particular cancer treatment. The subject methods can be used to theranose cancers including those listed herein, e.g., in the “Phenotypes” section below. These include without limitation lung cancer, non-small cell lung cancer small cell lung cancer (including small cell carcinoma (oat cell cancer), mixed small cell/large cell carcinoma, and combined small cell carcinoma), colon cancer, breast cancer, prostate cancer, liver cancer, pancreatic cancer, brain cancer, kidney cancer, ovarian cancer, stomach cancer, melanoma, bone cancer, gastric cancer, breast cancer, glioma, glioblastoma, hepatocellular carcinoma, papillary renal carcinoma, head and neck squamous cell carcinoma, leukemia, lymphoma, myeloma, or other solid tumors.

[0130] A biosignature of circulating biomarkers, including markers associated with a component present in a biological sample (e.g., cell, cell-fragment, cell-derived extracellular vesicle), in a sample from a subject suffering from a cancer can be used select a candidate treatment for the subject. The biosignature can be determined according to the methods of the invention presented herein. In some embodiments, the candidate treatment comprises a standard of care for the cancer. The treatment can be a cancer treatment such as radiation, surgery, chemotherapy or a combination thereof. The cancer treatment can be a therapeutic such as anti-cancer agents and chemotherapeutic regimens. Further drug associations and rules that are used in embodiments of the invention are found in PCT/US2007/69286, filed May 18, 2007; PCT/US2009/60630, filed Oct. 14, 2009; PCT/2010/000407, filed Feb. 11, 2010; PCT/US12/41393, filed Jun. 7, 2012; PCT/US2013/073184, filed Dec. 4, 2013; PCT/US2010/54366, filed Oct. 27, 2010; PCT/US11/67527, filed Dec. 28, 2011; PCT/US15/13618, filed Jan. 29, 2015; and PCT/US16/20657, filed Mar. 3, 2016.

### Biomarker Detection

[0131] The compositions and methods of the invention can be used to assess any useful biomarkers in a biological sample for charactering a phenotype associated with the sample. Such biomarkers include all sorts of biological entities such as proteins, nucleic acids, lipids, carbohydrates, complexes of any thereof, and microvesicles. Various molecules associated with a microvesicle surface or enclosed within the microvesicle (referred to herein as “payload”) can serve as biomarkers. The microvesicles themselves can also be used as biomarkers.

[0132] The aptamers of the invention can be used to assess levels or presence of a microvesicle population. See, e.g., FIGS. 12B-C. The aptamers of the invention can also be used to assess levels or presence of their specific target molecule. See, e.g., FIG. 12A. In addition, aptamers of the invention are used to capture or isolated a component present in a biological sample that has the aptamer's target molecule present. For example, if a given microvesicle surface antigen is present on a cell, cell fragment or cell-derived extracellular vesicle. A binding agent to the biomarker, including without limitation an aptamer provided by the invention, may be used to capture or isolate the cell, cell fragment or cell-derived extracellular vesicles. See, e.g., FIGS. 2A-B, 12A. Such captured or isolated entities may be further characterized to assess additional surface antigens or internal “payload” molecules present (i.e., nucleic acid molecules, lipids, sugars, polypeptides or functional fragments thereof, or anything else present in the cellular milieu that may be used as a biomarker), where one or more biomarkers provide a biosignature to assess a desired phenotype, such a s disease or condition. See, e.g., FIG. 2F. Therefore, aptamers of the invention are used not only to assess one or more microvesicle surface antigen of interest but are also used to separate a component present in a biological sample, where the components themselves can be further assessed to identify a candidate biosignature.

[0133] The methods of the invention can comprise multiplex analysis of at least 2, 3, 4, 5, 6, 7, 8, 9, 10, 11, 12, 13, 14, 15, 16, 17, 18, 19, 20, 25, 50, 75 or 100 different biomarkers. For example, an assay of a heterogeneous population of vesicles can be performed with a plurality of particles that are differentially labeled. There can be at least 2, 3, 4, 5, 6, 7, 8, 9, 10, 11, 12, 13, 14, 15, 16, 17, 18, 19, 20, 25, 50, 75 or 100 differentially labeled particles. The particles may be externally labeled, such as with a tag, or they may be intrinsically labeled. Each differentially labeled particle can be coupled to a capture agent, such as a binding agent, for a vesicle, resulting in capture of a vesicle. The multiple capture agents can be selected to characterize a phenotype of interest, including capture agents against general vesicle biomarkers, cell-of-origin specific biomarkers, and disease biomarkers. One or more biomarkers of the captured vesicle can then be detected by a plurality of binding agents. The binding agent can be directly labeled to facilitate detection. Alternatively, the binding agent is labeled by a secondary agent. For example, the binding agent may be an antibody for a biomarker on the vesicle, wherein the binding agent is linked to biotin. A secondary agent comprises streptavidin linked to a reporter and can be added to detect the biomarker. In some embodiments, the captured vesicle is assayed for at least 2, 3, 4, 5, 6, 7, 8, 9, 10, 11, 12, 13, 14, 15, 16, 17, 18, 19, 20, 25, 50, 75 or 100 different biomarkers. For example, multiple detectors, i.e., detection of multiple biomarkers of a captured vesicle or population of vesicles, can increase the signal obtained, permitted increased sensitivity, specificity, or both, and the use of smaller amounts of samples. Detection can be with more than one biomarker, including without limitation more than one vesicle marker such as in any of Tables 3, 10-17, 24, 29-32, 39-41 or 46-49, and Table 4 of PCT/US2016/044595, filed Jul. 28, 2016, which reference is incorporated herein by reference in its entirety.

[0134] An immunoassay based method (e.g., sandwich assay) can be used to detect a biomarker of a vesicle. An example includes ELISA. A binding agent can be bound to a well. For example, a binding agent such as an aptamer or antibody to an antigen of a vesicle can be attached to a well. A biomarker on the captured vesicle can be detected based on the methods described herein. FIG. 2A shows an illustrative schematic for a sandwich-type of immunoassay. The capture agent can be against a vesicle antigen of interest, e.g., a general vesicle biomarker, a cell-of-origin marker, or a disease marker. In the figure, the captured vesicles are detected using fluorescently labeled binding agent (detection agent) against vesicle antigens of interest. Multiple capture binding agents can be used, e.g., in distinguishable addresses on an array or different wells of an immunoassay plate. The detection binding agents can be against the same antigen as the capture binding agent, or can be directed against other markers. The capture binding agent can be any useful binding agent, e.g., tethered aptamers, antibodies or lectins, and/or the detector antibodies can be similarly substituted, e.g., with detectable (e.g., labeled) aptamers, antibodies, lectins or other binding proteins or entities. In an embodiment, one or more capture agents to a general vesicle biomarker, a cell-of-origin marker, and/or a disease marker are used along with detection agents against general vesicle biomarker, such as tetraspanin molecules including without limitation one or more of CD9, CD63 and CD81, or other markers in Table 3 herein. Examples of microvesicle surface antigens are disclosed herein, e.g. in Table 3 or Tables 10-17, Table 4 of PCT/US2016/044595, filed Jul. 28, 2016, or are known in the art, and examples useful in methods and compositions of the invention are disclosed of International Patent Application Nos. PCT/US2009/62880, filed Oct. 30, 2009; PCT/US2009/006095, filed Nov. 12, 2009; PCT/US2011/26750, filed Mar. 1, 2011; PCT/US2011/031479, filed Apr. 6, 2011; PCT/US11/48327, filed Aug. 18, 2011; PCT/US2008/71235, filed Jul. 25, 2008; PCT/US10/58461, filed Nov. 30, 2010; PCT/US2011/21160, filed Jan. 13, 2011; PCT/US2013/030302, filed Mar. 11, 2013; PCT/US12/25741, filed Feb. 17, 2012; PCT/2008/76109, filed Sep. 12, 2008; PCT/US12/42519, filed Jun. 14, 2012; PCT/US12/50030, filed Aug. 8, 2012; PCT/US12/49615, filed Aug. 3, 2012; PCT/US12/41387, filed Jun. 7, 2012; PCT/US2013/072019, filed Nov. 26, 2013; PCT/US2014/039858, filed May 28, 2013; PCT/IB2013/003092, filed Oct. 23, 2013; PCT/US13/76611, filed Dec. 19, 2013; PCT/US14/53306, filed Aug. 28, 2014; and PCT/US15/62184, filed Nov. 23, 2015; PCT/US2016/021632, filed Mar. 9, 2016; PCT/US2016/040157, filed Jun. 29, 2016; and PCT/US2016/044595, filed Jul. 28, 2016; each of which applications is incorporated herein by reference in its entirety.

[0135] FIG. 2D presents an illustrative schematic for analyzing vesicles according to the methods of the invention. Capture agents are used to capture vesicles, detectors are used to detect the captured vesicles, and the level or presence of the captured and detected microvesicles is used to characterize a phenotype. Capture agents, detectors and characterizing phenotypes can be any of those described herein. For example, capture agents include antibodies or aptamers tethered to a substrate that recognize a vesicle antigen of interest, detectors include labeled antibodies or aptamers to a vesicle antigen of interest, and characterizing a phenotype includes a diagnosis, prognosis, or theranosis of a disease. In the scheme shown in FIG. 2D i), a population of vesicles is captured with one or more capture agents against general vesicle biomarkers (200). The captured vesicles are then labeled with detectors against cell-of-origin biomarkers (201) and/or disease specific biomarkers (202). If only cell-of-origin detectors are used (201), the biosignature used to characterize the phenotype (203) can include the general vesicle markers (200) and the cell-of-origin biomarkers (201). If only disease detectors are used (202), the biosignature used to characterize the phenotype (203) can include the general vesicle markers (200) and the disease biomarkers (202). Alternately, detectors are used to detect both cell-of-origin biomarkers (201) and disease specific biomarkers (202). In this case, the biosignature used to characterize the phenotype (203) can include the general vesicle markers (200), the cell-of-origin biomarkers (201) and the disease biomarkers (202). The biomarkers combinations are selected to characterize the phenotype of interest and can be selected from the biomarkers and phenotypes described herein, e.g., in Table 1, Table 3 or Tables 10-17, or in Table 4 of PCT/US2016/044595.

[0136] In the scheme shown in FIG. 2D ii), a population of vesicles is captured with one or more capture agents against cell-of-origin biomarkers (210) and/or disease biomarkers (211). The captured vesicles are then detected using detectors against general vesicle biomarkers (212). If only cell-of-origin capture agents are used (210), the biosignature used to characterize the phenotype (213) can include the cell-of-origin biomarkers (210) and the general vesicle markers (212). If only disease biomarker capture agents are used (211), the biosignature used to characterize the phenotype (213) can include the disease biomarkers (211) and the general vesicle biomarkers (212). Alternately, capture agents to one or more cell-of-origin biomarkers (210) and one or more disease specific biomarkers (211) are used to capture vesicles. In this case, the biosignature used to characterize the phenotype (213) can include the cell-of-origin biomarkers (210), the disease biomarkers (211), and the general vesicle markers (213). The biomarkers combinations are selected to characterize the phenotype of interest and can be selected from the biomarkers and phenotypes described herein.

[0137] The methods of the invention comprise capture and detection of microvesicles of interest using any combination of useful biomarkers. For example, a microvesicle population can be captured using one or more binding agent to any desired combination of cell of origin, disease specific, or general vesicle markers. The captured microvesicles can then be detected using one or more binding agent to any desired combination of cell of origin, disease specific, or general vesicle markers. FIG. 2E represents a flow diagram of such configurations. Any one or more of a cell-of-origin biomarker (240), disease biomarkers (241), and general vesicle biomarker (242) is used to capture a microvesicle population. Thereafter, any one or more of a cell-of-origin biomarker (243), disease biomarkers (244), and general vesicle biomarker (245) is used to detect the captured microvesicle population. The biosignature of captured and detected microvesicles is then used to characterize a phenotype. The biomarkers combinations are selected to characterize the phenotype of interest and can be selected from the biomarkers and phenotypes described herein.

[0138] A microvesicle payload molecule can be assessed as a member of a biosignature panel. A payload molecule comprises any of the biological entities contained within a cell, cell fragment or vesicle membrane. These entities include without limitation nucleic acids, e.g., mRNA, microRNA, or DNA fragments; protein, e.g., soluble and membrane associated proteins; carbohydrates; lipids; metabolites; and various small molecules, e.g., hormones. The payload can be part of the cellular milieu that is encapsulated as a vesicle is formed in the cellular environment. In some embodiments of the invention, the payload is analyzed in addition to detecting vesicle surface antigens. Specific populations of vesicles can be captured as described above then the payload in the captured vesicles can be used to characterize a phenotype. For example, vesicles captured on a substrate can be further isolated to assess the payload therein. Alternately, the vesicles in a sample are detected and sorted without capture. The vesicles so detected can be further isolated to assess the payload therein. In an embodiment, vesicle populations are sorted by flow cytometry and the payload in the sorted vesicles is analyzed. In the scheme shown in FIG. 2F iv), a population of vesicles is captured and/or detected (220) using one or more of cell-of-origin biomarkers (220), disease biomarkers (221), and/or general vesicle markers (222). The payload of the isolated vesicles is assessed (223). A biosignature detected within the payload can be used to characterize a phenotype (224). In a non-limiting example, a vesicle population can be analyzed in a plasma sample from a patient using antibodies against one or more vesicle antigens of interest. The antibodies can be capture antibodies which are tethered to a substrate to isolate a desired vesicle population. Alternately, the antibodies can be directly labeled and the labeled vesicles isolated by sorting with flow cytometry. The presence or level of microRNA or mRNA extracted from the isolated vesicle population can be used to detect a biosignature. The biosignature is then used to diagnose, prognose or theranose the patient.

[0139] In other embodiments, vesicle or cellular payload is analyzed in a population (e.g., cells or vesicles) without first capturing or detected subpopulations of vesicles. For example, a cellular or extracellular vesicle population can be generally isolated from a sample using centrifugation, filtration, chromatography, or other techniques as described herein and known in the art. The payload of such sample components can be analyzed thereafter to detect a biosignature and characterize a phenotype. In the scheme shown in FIG. 2F v), a population of vesicles is isolated (230) and the payload of the isolated vesicles is assessed (231). A biosignature detected within the payload can be used to characterize a phenotype (232). In a non-limiting example, a vesicle population is isolated from a plasma sample from a patient using size exclusion and membrane filtration. The presence or level of microRNA or mRNA extracted from the vesicle population is used to detect a biosignature. The biosignature is then used to diagnose, prognose or theranose the patient.

[0140] The biomarkers used to detect a vesicle population can be selected to detect a microvesicle population of interest, e.g., a population of vesicles that provides a diagnosis, prognosis or theranosis of a selected condition or disease, including but not limited to a cancer, a premalignant condition, an inflammatory disease, an immune disease, an autoimmune disease or disorder, a cardiovascular disease or disorder, neurological disease or disorder, infectious disease or pain. See Section “Phenotypes” herein for more detail. In an embodiment, the biomarkers are selected from the group consisting of EpCam (epithelial cell adhesion molecule), CD9 (tetraspanin CD9 molecule), PCSA (prostate cell specific antigen, see Rokhlin et al., 5E10: a prostate-specific surface-reactive monoclonal antibody. Cancer Lett. 1998 131:129-36), CD63 (tetraspanin CD63 molecule), CD81 (tetraspanin CD81 molecule), PSMA (FOLH1, folate hydrolase (prostate-specific membrane antigen) 1), B7H3 (CD276 molecule), PSCA (prostate stem cell antigen), ICAM (intercellular adhesion molecule), STEAP (STEAP1, six transmembrane epithelial antigen of the prostate 1), KLK2 (kallikrein-related peptidase 2), SSX2 (synovial sarcoma, X breakpoint 2), SSX4 (synovial sarcoma, X breakpoint 4), PBP (prostatic binding protein), SPDEF (SAM pointed domain containing ets transcription factor), EGFR (epidermal growth factor receptor), and a combination thereof. One or more of these markers can provide a biosignature for a specific condition, such as to detect a cancer, including without limitation a carcinoma, a prostate cancer, a breast cancer, a lung cancer, a colorectal cancer, an ovarian cancer, melanoma, a brain cancer, or other type of cancer as disclosed herein. In an embodiment, a binding agent to one or more of these markers is used to capture a microvesicle population, and an aptamer of the invention is used to assist in detection of the capture vesicles as described herein. In other embodiments, an aptamer of the invention is used to capture a microvesicle population, and a binding agent to one or more of these markers is used to assist in detection of the capture vesicles as described herein. The binding agents can be any useful binding agent as disclosed herein or known in the art, e.g., antibodies or aptamers.

[0141] The methods of characterizing a phenotype can employ a combination of techniques to assess a component or population of components present in a biological sample of interest. For example, an aptamer of the invention can be used to assess a single cell, or a single extracellular vesicle or a population of cells or population of vesicles. A sample may be split into various aliquots, where each is analyzed separately. For example, protein content of one or more aliquot is determined and microRNA content of one or more other aliquot is determined. The protein content and microRNA content can be combined to characterize a phenotype. In another embodiment, a component present in a biological sample of interest is isolated and the payload therein is assessed (e.g., capture a population of subpopulation of vesicles using an aptamer of the invention and further assess nucleic acid or proteins present in the isolated vesicles).

[0142] In one embodiment, a population of vesicles with a given surface marker can be isolated by using a binding agent to a microvesicle surface marker. See, e.g., FIGS. 2A, 2B, 21A. The binding agent can be an aptamer that was identified to target the microvesicle surface marker using to the methods of the invention. The isolated vesicles is assessed for additional biomarkers such as surface content or payload, which can be contemporaneous to detection of the aptamer-specific target or the assessment of additional biomarkers can be before or subsequent to aptamer-specific target detection.

[0143] A biosignature can be detected qualitatively or quantitatively by detecting a presence, level or concentration of a circulating biomarker, e.g., a microRNA, protein, vesicle or other biomarker, as disclosed herein. These biosignature components can be detected using a number of techniques known to those of skill in the art. For example, a biomarker can be detected by microarray analysis, polymerase chain reaction (PCR) (including PCR-based methods such as real time polymerase chain reaction (RT-PCR), quantitative real time polymerase chain reaction (Q-PCR/qPCR) and the like), hybridization with allele-specific probes, enzymatic mutation detection, ligation chain reaction (LCR), oligonucleotide ligation assay (OLA), flow-cytometric heteroduplex analysis, chemical cleavage of mismatches, mass spectrometry, nucleic acid sequencing, single strand conformation polymorphism (SSCP), denaturing gradient gel electrophoresis (DGGE), temperature gradient gel electrophoresis (TGGE), restriction fragment polymorphisms, serial analysis of gene expression (SAGE), or combinations thereof. A biomarker, such as a nucleic acid, can be amplified prior to detection. A biomarker can also be detected by immunoassay, immunoblot, immunoprecipitation, enzyme-linked immunosorbent assay (ELISA; EIA), radioimmunoassay (RIA), flow cytometry, or electron microscopy (EM).

[0144] Biosignatures can be detected using aptamers of the invention that function as either as capture agents and detection agents, as described herein. A capture agent can comprise an antibody, aptamer or other entity which recognizes a biomarker and can be used for capturing the biomarker. Biomarkers that can be captured include circulating biomarkers, e.g., a protein, nucleic acid, lipid or biological complex in solution in a bodily fluid. Similarly, the capture agent can be used for capturing a vesicle. A detection agent can comprise an antibody or other entity which recognizes a biomarker and can be used for detecting the biomarker vesicle, or which recognizes a vesicle and is useful for detecting a vesicle. In some embodiments, the detection agent is labeled and the label is detected, thereby detecting the biomarker or vesicle. The detection agent can be a binding agent, e.g., an antibody or aptamer. In other embodiments, the detection agent comprises a small molecule such as a membrane protein labeling agent. See, e.g., the membrane protein labeling agents disclosed in Alroy et al., US. Patent Publication US 2005/0158708. In an embodiment, vesicles are isolated or captured as described herein, and one or more membrane protein labeling agent is used to detect the vesicles. In many cases, the antigen or other vesicle-moiety that is recognized by the capture and detection agents are interchangeable.

[0145] In a non-limiting embodiment, a vesicle having a cell-of-origin specific antigen on its surface and a cancer-specific antigen on its surface, is captured using a binding agent that is specific to a cells-specific antigen, e.g., by tethering the capture antibody or aptamer to a substrate, and then the vesicle is detected using a binding agent to a disease-specific antigen, e.g., by labeling the binding agent used for detection with a fluorescent dye and detecting the fluorescent radiation emitted by the dye.

[0146] It will be apparent to one of skill in the art that where the target molecule for a binding agent (such as an aptamer of the invention) is informative as to assessing a condition or disease, the same binding agent can be used to both capture a component comprising the target molecule (e.g., microvesicle surface antigen of interest) and also be modified to comprise a detectable label so as to detect the target molecule, e.g., binding agent₁-antigen-binding agent₂*, wherein the * signifies a detectable label; binding agent₁ and binding agent₂ may be the same binding agent or a different binding agent (e.g., same aptamer or different aptamer). In addition, binding agent₁ and binding agent₂ can be selected from wholly different categories of binding agents (e.g., antibody, aptamer, synthetic antibody, peptide-nucleic acid molecule, or any molecule that is configured to specifically bind to or associate with its target molecule). Such binding molecules can be selected solely based on their binding specificity for a target molecule. Examples of additional biomarkers that can be incorporated into the methods and compositions of the invention are known in the art, such as those disclosed in International Patent Publication Nos. WO/2012/174282 (Int'l Appl. PCT/US2012/042519 filed Jun. 14, 2012) and WO/2013/020995 (Int'l Appl. PCT/US2012/050030 filed Aug. 8, 2013). The detectable signal can itself be associated with a nucleic acid molecule that hybridizes with a stretch of nucleic acids present in each oligonucleotide comprising a probing library. The stretch can be the same or different as to one or more oligonucleotides in a library. The detectable signal can comprise fluorescence agents, including color-coded barcodes which are known, such as in U.S. Patent Application Pub. No. 20140371088, 2013017837, and 20120258870.

[0147] Techniques of detecting biomarkers or capturing sample components using an aptamer of the invention include the use of a planar substrate such as an array (e.g., biochip or microarray), with molecules immobilized to the substrate as capture agents that facilitate the detection of a particular biosignature. The array can be provided as part of a kit for assaying one or more biomarkers. Additional examples of binding agents described above and useful in the compositions and methods of the invention are disclosed in International Patent Publication No. WO/2011/127219, entitled “Circulating Biomarkers for Disease” and filed Apr. 6, 2011, which application is incorporated by reference in its entirety herein. Aptamers of the invention can be included in an array for detection and diagnosis of diseases including presymptomatic diseases. In some embodiments, an array comprises a custom array comprising biomolecules selected to specifically identify biomarkers of interest. Customized arrays can be modified to detect biomarkers that increase statistical performance, e.g., additional biomolecules that identifies a biosignature which lead to improved cross-validated error rates in multivariate prediction models (e.g., logistic regression, discriminant analysis, or regression tree models). In some embodiments, customized array(s) are constructed to study the biology of a disease, condition or syndrome and profile biosignatures in defined physiological states. Markers for inclusion on the customized array be chosen based upon statistical criteria, e.g., having a desired level of statistical significance in differentiating between phenotypes or physiological states. In some embodiments, standard significance of p-value=0.05 is chosen to exclude or include biomolecules on the microarray. The p-values can be corrected for multiple comparisons. As an illustrative example, nucleic acids extracted from samples from a subject with or without a disease can be hybridized to a high density microarray that binds to thousands of gene sequences. Nucleic acids whose levels are significantly different between the samples with or without the disease can be selected as biomarkers to distinguish samples as having the disease or not. A customized array can be constructed to detect the selected biomarkers. In some embodiments, customized arrays comprise low density microarrays, which refer to arrays with lower number of addressable binding agents, e.g., tens or hundreds instead of thousands. Low density arrays can be formed on a substrate. In some embodiments, customizable low density arrays use PCR amplification in plate wells, e.g., TaqMan® Gene Expression Assays (Applied Biosystems by Life Technologies Corporation, Carlsbad, Calif.).

[0148] An aptamer of the invention or other useful binding agent may be linked directly or indirectly to a solid surface or substrate. See, e.g., FIGS. 2A-2B, 9, 21A. A solid surface or substrate can be any physically separable solid to which a binding agent can be directly or indirectly attached including, but not limited to, surfaces provided by microarrays and wells, particles such as beads, columns, optical fibers, wipes, glass and modified or functionalized glass, quartz, mica, diazotized membranes (paper or nylon), polyformaldehyde, cellulose, cellulose acetate, paper, ceramics, metals, metalloids, semiconductive materials, quantum dots, coated beads or particles, other chromatographic materials, magnetic particles; plastics (including acrylics, polystyrene, copolymers of styrene or other materials, polypropylene, polyethylene, polybutylene, polyurethanes, Teflon material, etc.), polysaccharides, nylon or nitrocellulose, resins, silica or silica-based materials including silicon and modified silicon, carbon, metals, inorganic glasses, plastics, ceramics, conducting polymers (including polymers such as polypyrole and polyindole); micro or nanostructured surfaces such as nucleic acid tiling arrays, nanotube, nanowire, or nanoparticulate decorated surfaces; or porous surfaces or gels such as methacrylates, acrylamides, sugar polymers, cellulose, silicates, or other fibrous or stranded polymers. In addition, as is known the art, the substrate may be coated using passive or chemically-derivatized coatings with any number of materials, including polymers, such as dextrans, acrylamides, gelatins or agarose. Such coatings can facilitate the use of the array with a biological sample.

[0149] As provided in the examples, below, an aptamer or other useful binding agent can be conjugated to a detectable entity or label.

[0150] Appropriate labels include without limitation a magnetic label, a fluorescent moiety, an enzyme, a chemiluminescent probe, a metal particle, a non-metal colloidal particle, a polymeric dye particle, a pigment molecule, a pigment particle, an electrochemically active species, semiconductor nanocrystal or other nanoparticles including quantum dots or gold particles, fluorophores, quantum dots, or radioactive labels. Protein labels include green fluorescent protein (GFP) and variants thereof (e.g., cyan fluorescent protein and yellow fluorescent protein); and luminescent proteins such as luciferase, as described below. Radioactive labels include without limitation radioisotopes (radionuclides), such as ³H, ¹¹C, ¹⁴C, ¹⁸F, ³²P, ³⁵S, ⁶⁴CU, ⁶⁸Ga, ⁸⁶Y, ⁹⁹Tc, ¹¹¹n, ¹²³I, ¹²⁴I, ¹²⁵I, ¹³¹I, ¹³³Xe, ¹⁷⁷Lu, ²¹¹At, or ²¹³Bi. Fluorescent labels include without limitation a rare earth chelate (e.g., europium chelate), rhodamine; fluorescein types including without limitation FITC, 5-carboxyfluorescein, 6-carboxy fluorescein; a rhodamine type including without limitation TAMRA; dansyl; Lissamine; cyanines; phycoerythrins; Texas Red; Cy3, Cy5, dapoxyl, NBD, Cascade Yellow, dansyl, PyMPO, pyrene, 7-diethylaminocoumarin-3-carboxylic acid and other coumarin derivatives, Marina Blue™, Pacific Blue™, Cascade Blue™, 2-anthracenesulfonyl, PyMPO, 3,4,9,10-perylene-tetracarboxylic acid, 2,7-difluorofluorescein (Oregon Green™ 488-X), 5-carboxyfluorescein, Texas Red™-X, Alexa Fluor 430, 5-carboxytetramethylrhodamine (5-TAMRA), 6-carboxytetramethylrhodamine (6-TAMRA), BODIPY FL, bimane, and Alexa Fluor 350, 405, 488, 500, 514, 532, 546, 555, 568, 594, 610, 633, 647, 660, 680, 700, and 750, and derivatives thereof, among many others. See, e.g., “The Handbook—A Guide to Fluorescent Probes and Labeling Technologies,” Tenth Edition, available on the internet at probes (dot) invitrogen (dot) com/handbook. The fluorescent label can be one or more of FAM, dRHO, 5-FAM, 6FAM, dR6G, JOE, HEX, VIC, TET, dTAMRA, TAMRA, NED, dROX, PET, BHQ, Gold540 and LIZ.

[0151] Using conventional techniques, an aptamer can be directly or indirectly labeled, e.g., the label is attached to the aptamer through biotin-streptavidin (e.g., synthesize a biotinylated aptamer, which is then capable of binding a streptavidin molecule that is itself conjugated to a detectable label; non-limiting example is streptavidin, phycoerythrin conjugated (SAPE)). Methods for chemical coupling using multiple step procedures include biotinylation, coupling of trinitrophenol (TNP) or digoxigenin using for example succinimide esters of these compounds. Biotinylation can be accomplished by, for example, the use of D-biotinyl-N-hydroxysuccinimide. Succinimide groups react effectively with amino groups at pH values above 7, and preferentially between about pH 8.0 and about pH 8.5. Alternatively, an aptamer is not labeled, but is later contacted with a second antibody that is labeled after the first antibody is bound to an antigen of interest.

[0152] Various enzyme-substrate labels may also be used in conjunction with a composition or method of the invention. Such enzyme-substrate labels are available commercially (e.g., U.S. Pat. No. 4,275,149). The enzyme generally catalyzes a chemical alteration of a chromogenic substrate that can be measured using various techniques. For example, the enzyme may catalyze a color change in a substrate, which can be measured spectrophotometrically. Alternatively, the enzyme may alter the fluorescence or chemiluminescence of the substrate. Examples of enzymatic labels include luciferases (e.g., firefly luciferase and bacterial luciferase; U.S. Pat. No. 4,737,456), luciferin, 2,3-dihydrophthalazinediones, malate dehydrogenase, urease, peroxidase such as horseradish peroxidase (HRP), alkaline phosphatase (AP), β-galactosidase, glucoamylase, lysozyme, saccharide oxidases (e.g., glucose oxidase, galactose oxidase, and glucose-6-phosphate dehydrogenase), heterocyclic oxidases (such as uricase and xanthine oxidase), lactoperoxidase, microperoxidase, and the like. Examples of enzyme-substrate combinations include, but are not limited to, horseradish peroxidase (HRP) with hydrogen peroxidase as a substrate, wherein the hydrogen peroxidase oxidizes a dye precursor (e.g., orthophenylene diamine (OPD) or 3,3′,5,5′-tetramethylbenzidine hydrochloride (TMB)); alkaline phosphatase (AP) with para-nitrophenyl phosphate as chromogenic substrate; and β-D-galactosidase (β-D-Gal) with a chromogenic substrate (e.g., p-nitrophenyl-β-D-galactosidase) or fluorogenic substrate 4-methylumbelliferyl-β-D-galactosidase.

[0153] Aptamer(s) can be linked to a substrate such as a planar substrate. A planar array generally contains addressable locations (e.g., pads, addresses, or micro-locations) of biomolecules in an array format. The size of the array will depend on the composition and end use of the array. Arrays can be made containing from 2 different molecules to many thousands. Generally, the array comprises from two to as many as 100,000 or more molecules, depending on the end use of the array and the method of manufacture. A microarray for use with the invention comprises at least one biomolecule that identifies or captures a biomarker present in a biosignature of interest, e.g., a microRNA or other biomolecule or vesicle that makes up the biosignature. In some arrays, multiple substrates are used, either of different or identical compositions. Accordingly, planar arrays may comprise a plurality of smaller substrates.

[0154] The present invention can make use of many types of arrays for detecting a biomarker, e.g., a biomarker associated with a biosignature of interest. Useful arrays or microarrays include without limitation DNA microarrays, such as cDNA microarrays, oligonucleotide microarrays and SNP microarrays, microRNA arrays, protein microarrays, antibody microarrays, tissue microarrays, cellular microarrays (also called transfection microarrays), chemical compound microarrays, and carbohydrate arrays (glycoarrays). These arrays are described in more detail above. In some embodiments, microarrays comprise biochips that provide high-density immobilized arrays of recognition molecules (e.g., aptamers or antibodies), where biomarker binding is monitored indirectly (e.g., via fluorescence).

[0155] An array or microarray that can be used to detect one or more biomarkers of a biosignature and comprising one or more aptamers of the invention can be made according to the methods described in U.S. Pat. Nos. 6,329,209; 6,365,418; 6,406,921; 6,475,808; and 6,475,809, and U.S. patent application Ser. No. 10/884,269, each of which is herein incorporated by reference in its entirety. Custom arrays to detect specific selections of sets of biomarkers described herein can be made using the methods described in these patents. Commercially available microarrays can also be used to carry out the methods of the invention, including without limitation those from Affymetrix (Santa Clara, Calif.), Illumina (San Diego, Calif.), Agilent (Santa Clara, Calif.), Exiqon (Denmark), or Invitrogen (Carlsbad, Calif.). Custom and/or commercial arrays include arrays for detection proteins, nucleic acids, and other biological molecules and entities (e.g., cells, vesicles, virii) as described herein.

[0156] In some embodiments, multiple capture molecules are disposed on an array, e.g., proteins, peptides or additional nucleic acid molecules. In certain embodiments, the proteins are immobilized using methods and materials that minimize the denaturing of the proteins, that minimize alterations in the activity of the proteins, or that minimize interactions between the protein and the surface on which they are immobilized. The capture molecules can comprise one or more aptamer of the invention. In one embodiment, an array is constructed for the hybridization of a pool of aptamers. The array can then be used to identify pool members that bind a sample, thereby facilitating characterization of a phenotype. See FIGS. 12B-19C and related disclosure for further details.

[0157] Array surfaces useful may be of any desired shape, form, or size. Non-limiting examples of surfaces include chips, continuous surfaces, curved surfaces, flexible surfaces, films, plates, sheets, or tubes. Surfaces can have areas ranging from approximately a square micron to approximately 500 cm². The area, length, and width of surfaces may be varied according to the requirements of the assay to be performed. Considerations may include, for example, ease of handling, limitations of the material(s) of which the surface is formed, requirements of detection systems, requirements of deposition systems (e.g., arrayers), or the like.

[0158] In certain embodiments, it is desirable to employ a physical means for separating groups or arrays of binding islands or immobilized biomolecules: such physical separation facilitates exposure of different groups or arrays to different solutions of interest. Therefore, in certain embodiments, arrays are situated within microwell plates having any number of wells. In such embodiments, the bottoms of the wells may serve as surfaces for the formation of arrays, or arrays may be formed on other surfaces and then placed into wells. In certain embodiments, such as where a surface without wells is used, binding islands may be formed or molecules may be immobilized on a surface and a gasket having holes spatially arranged so that they correspond to the islands or biomolecules may be placed on the surface. Such a gasket is preferably liquid tight. A gasket may be placed on a surface at any time during the process of making the array and may be removed if separation of groups or arrays is no longer desired.

[0159] In some embodiments, the immobilized molecules can bind to one or more biomarkers or vesicles present in a biological sample contacting the immobilized molecules. In some embodiments, the immobilized molecules modify or are modified by molecules present in the one or more vesicles contacting the immobilized molecules. Contacting the sample typically comprises overlaying the sample upon the array.

[0160] Modifications or binding of molecules in solution or immobilized on an array can be detected using detection techniques known in the art. Examples of such techniques include immunological techniques such as competitive binding assays and sandwich assays; fluorescence detection using instruments such as confocal scanners, confocal microscopes, or CCD-based systems and techniques such as fluorescence, fluorescence polarization (FP), fluorescence resonant energy transfer (FRET), total internal reflection fluorescence (TIRF), fluorescence correlation spectroscopy (FCS); colorimetric/spectrometric techniques; surface plasmon resonance, by which changes in mass of materials adsorbed at surfaces are measured; techniques using radioisotopes, including conventional radioisotope binding and scintillation proximity assays (SPA); mass spectroscopy, such as matrix-assisted laser desorption/ionization mass spectroscopy (MALDI) and MALDI-time of flight (TOF) mass spectroscopy; ellipsometry, which is an optical method of measuring thickness of protein films; quartz crystal microbalance (QCM), a very sensitive method for measuring mass of materials adsorbing to surfaces; scanning probe microscopies, such as atomic force microscopy (AFM), scanning force microscopy (SFM) or scanning electron microscopy (SEM); and techniques such as electrochemical, impedance, acoustic, microwave, and IR/Raman detection. See, e.g., Mere L, et al., “Miniaturized FRET assays and microfluidics: key components for ultra-high-throughput screening,” Drug Discovery Today 4(8):363-369 (1999), and references cited therein; Lakowicz J R, Principles of Fluorescence Spectroscopy, 2nd Edition, Plenum Press (1999), or Jain K K: Integrative Omics, Pharmacoproteomics, and Human Body Fluids. In: Thongboonkerd V, ed., ed. Proteomics of Human Body Fluids: Principles, Methods and Applications. Volume 1: Totowa, N.J.: Humana Press, 2007, each of which is herein incorporated by reference in its entirety.

[0161] Microarray technology can be combined with mass spectroscopy (MS) analysis and other tools. Electrospray interface to a mass spectrometer can be integrated with a capillary in a microfluidics device. For example, one commercially available system contains eTag reporters that are fluorescent labels with unique and well-defined electrophoretic mobilities; each label is coupled to biological or chemical probes via cleavable linkages. The distinct mobility address of each eTag reporter allows mixtures of these tags to be rapidly deconvoluted and quantitated by capillary electrophoresis. This system allows concurrent gene expression, protein expression, and protein function analyses from the same sample Jain K K: Integrative Omics, Pharmacoproteomics, and Human Body Fluids. In: Thongboonkerd V, ed., ed. Proteomics ofHuman Body Fluids: Principles, Methods and Applications. Volume 1: Totowa, N.J.: Humana Press, 2007, which is herein incorporated by reference in its entirety.

[0162] A biochip can include components for a microfluidic or nanofluidic assay. A microfluidic device can be used for isolating or analyzing biomarkers, such as determining a biosignature. Microfluidic systems allow for the miniaturization and compartmentalization of one or more processes for isolating, capturing or detecting a vesicle, detecting a microRNA, detecting a circulating biomarker, detecting a biosignature, and other processes. The microfluidic devices can use one or more detection reagents in at least one aspect of the system, and such a detection reagent can be used to detect one or more biomarkers. In one embodiment, the device detects a biomarker on an isolated or bound vesicle. Various probes, antibodies, proteins, or other binding agents can be used to detect a biomarker within the microfluidic system. The detection agents may be immobilized in different compartments of the microfluidic device or be entered into a hybridization or detection reaction through various channels of the device.

[0163] A vesicle in a microfluidic device can be lysed and its contents detected within the microfluidic device, such as proteins or nucleic acids, e.g., DNA or RNA such as miRNA or mRNA. The nucleic acid may be amplified prior to detection, or directly detected, within the microfluidic device. Thus microfluidic system can also be used for multiplexing detection of various biomarkers. In an embodiment, vesicles are captured within the microfluidic device, the captured vesicles are lysed, and a biosignature of microRNA from the vesicle payload is determined. The biosignature can further comprise the capture agent used to capture the vesicle.

[0164] Novel nanofabrication techniques are opening up the possibilities for biosensing applications that rely on fabrication of high-density, precision arrays, e.g., nucleotide-based chips and protein arrays otherwise known as heterogeneous nanoarrays. Nanofluidics allows a further reduction in the quantity of fluid analyte in a microchip to nanoliter levels, and the chips used here are referred to as nanochips. See, e.g., Unger M et al., Biotechniques 1999; 27(5):1008-14, Kartalov E P et al., Biotechniques 2006; 40(1):810-170, each of which are herein incorporated by reference in their entireties. Commercially available nanochips currently provide simple one step assays such as total cholesterol, total protein or glucose assays that can be run by combining sample and reagents, mixing and monitoring of the reaction. Gel-free analytical approaches based on liquid chromatography (LC) and nanoLC separations (Cutillas et al. Proteomics, 2005; 5:101-112 and Cutillas et al., Mol Cell Proteomics 2005; 4:1038-1051, each of which is herein incorporated by reference in its entirety) can be used in combination with the nanochips.

[0165] An array suitable for identifying a disease, condition, syndrome or physiological status can be included in a kit. A kit can include, an aptamer of the invention, including as non-limiting examples, one or more reagents useful for preparing molecules for immobilization onto binding islands or areas of an array, reagents useful for detecting binding of a vesicle to immobilized molecules, and instructions for use.

[0166] Further provided herein is a rapid detection device that facilitates the detection of a particular biosignature in a biological sample. The device can integrate biological sample preparation with polymerase chain reaction (PCR) on a chip. The device can facilitate the detection of a particular biosignature of a vesicle in a biological sample, and an example is provided as described in Pipper et al., Angewandte Chemie, 47(21), p. 3900-3904 (2008), which is herein incorporated by reference in its entirety. A biosignature can be incorporated using micro-/nano-electrochemical system (MEMS/NEMS) sensors and oral fluid for diagnostic applications as described in Li et al., Adv Dent Res 18(1): 3-5 (2005), which is herein incorporated by reference in its entirety.

[0167] Particle Arrays

[0168] As an alternative to planar arrays, assays using particles, such as bead based assays are also capable of use with an aptamer of the invention. Aptamers are easily conjugated with commercially available beads. See, e.g., Srinivas et al. Anal. Chem. 2011 Oct. 21, Aptamer functionalized Microgel Particles for Protein Detection; See also, review article on aptamers as therapeutic and diagnostic agents, Brody and Gold, Rev. Mol. Biotech. 2000, 74:5-13.

[0169] Multiparametric assays or other high throughput detection assays using bead coatings with cognate ligands and reporter molecules with specific activities consistent with high sensitivity automation can be used. In a bead based assay system, a binding agent for a biomarker or vesicle, such as a capture agent (e.g. capture antibody), can be immobilized on an addressable microsphere. Each binding agent for each individual binding assay can be coupled to a distinct type of microsphere (i.e., microbead) and the assay reaction takes place on the surface of the microsphere, such as depicted in FIG. 2B. A binding agent for a vesicle can be a capture antibody coupled to a bead. Dyed microspheres with discrete fluorescence intensities are loaded separately with their appropriate binding agent or capture probes. The different bead sets carrying different binding agents can be pooled as desired to generate custom bead arrays. Bead arrays are then incubated with the sample in a single reaction vessel to perform the assay.

[0170] Bead-based assays can also be used with one or more aptamers of the invention. A bead substrate can provide a platform for attaching one or more binding agents, including aptamer(s). For multiplexing, multiple different bead sets (e.g., Illumina, Luminex) can have different binding agents (specific to different target molecules). For example, a bead can be conjugated to an aptamer of the invention used to detect the presence (quantitatively or qualitatively) of an antigen of interest, or it can also be used to isolate a component present in a selected biological sample (e.g., cell, cell-fragment or vesicle comprising the target molecule to which the aptamer is configured to bind or associate). Any molecule of organic origin can be successfully conjugated to a polystyrene bead through use of commercially available kits.

[0171] One or more aptamers of the invention can be used with any bead based substrate, including but not limited to magnetic capture method, fluorescence activated cell sorting (FACS) or laser cytometry. Magnetic capture methods can include, but are not limited to, the use of magnetically activated cell sorter (MACS) microbeads or magnetic columns. Examples of bead or particle based methods that can be modified to use an aptamer of the invention include methods and bead systems described in U.S. Pat. Nos. 4,551,435, 4,795,698, 4,925,788, 5,108,933, 5,186,827, 5,200,084 or 5,158,871; 7,399,632; 8,124,015; 8,008,019; 7,955,802; 7,445,844; 7,274,316; 6,773,812; 6,623,526; 6,599,331; 6,057,107; 5,736,330; International Patent Publication No. WO/2012/174282; WO/1993/022684.

[0172] Flow Cytometry

[0173] Isolation or detection of circulating biomarkers, e.g., protein antigens, from a biological sample, or of the biomarker-comprising cells, cell fragments or vesicles may also be achieved using an aptamer of the invention in a cytometry process. As a non-limiting example, aptamers of the invention can be used in an assay comprising using a particle such as a bead or microsphere The invention provides aptamers as binding agents, which may be conjugated to the particle. Flow cytometry can be used for sorting microscopic particles suspended in a stream of fluid. As particles pass through they can be selectively charged and on their exit can be deflected into separate paths of flow. It is therefore possible to separate populations from an original mix, such as a biological sample, with a high degree of accuracy and speed. Flow cytometry allows simultaneous multiparametric analysis of the physical and/or chemical characteristics of single cells flowing through an optical/electronic detection apparatus. A beam of light, usually laser light, of a single frequency (color) is directed onto a hydrodynamically focused stream of fluid. A number of detectors are aimed at the point where the stream passes through the light beam; one in line with the light beam (Forward Scatter or FSC) and several perpendicular to it (Side Scatter or SSC) and one or more fluorescent detectors.

[0174] Each suspended particle passing through the beam scatters the light in some way, and fluorescent chemicals in the particle may be excited into emitting light at a lower frequency than the light source. This combination of scattered and fluorescent light is picked up by the detectors, and by analyzing fluctuations in brightness at each detector (one for each fluorescent emission peak), it is possible to deduce various facts about the physical and chemical structure of each individual particle. FSC correlates with the cell size and SSC depends on the inner complexity of the particle, such as shape of the nucleus, the amount and type of cytoplasmic granules or the membrane roughness. Some flow cytometers have eliminated the need for fluorescence and use only light scatter for measurement.

[0175] Flow cytometers can analyze several thousand particles every second in “real time” and can actively separate out and isolate particles having specified properties. They offer high-throughput automated quantification, and separation, of the set parameters for a high number of single cells during each analysis session. Flow cytometers can have multiple lasers and fluorescence detectors, allowing multiple labels to be used to more precisely specify a target population by their phenotype. Thus, a flow cytometer, such as a multicolor flow cytometer, can be used to detect one or more vesicles with multiple fluorescent labels or colors. In some embodiments, the flow cytometer can also sort or isolate different vesicle populations, such as by size or by different markers.

[0176] The flow cytometer may have one or more lasers, such as 1, 2, 3, 4, 5, 6, 7, 8, 9, 10 or more lasers. In some embodiments, the flow cytometer can detect more than one color or fluorescent label, such as at least 2, 3, 4, 5, 6, 7, 8, 9, 10, 11, 12, 13, 14, 15, 16, 17, 18, 19, or 20 different colors or fluorescent labels. For example, the flow cytometer can have at least 2, 3, 4, 5, 6, 7, 8, 9, 10, 11, 12, 13, 14, 15, 16, 17, 18, 19, or 20 fluorescence detectors.

[0177] Examples of commercially available flow cytometers that can be used to detect or analyze one or more vesicles, to sort or separate different populations of vesicles, include, but are not limited to the MoFlo™ XDP Cell Sorter (Beckman Coulter, Brea, Calif.), MoFlo™ Legacy Cell Sorter (Beckman Coulter, Brea, Calif.), BD FACSAria™ Cell Sorter (BD Biosciences, San Jose, Calif.), BD™ LSRII (BD Biosciences, San Jose, Calif.), and BD FACSCalibur™ (BD Biosciences, San Jose, Calif.). Use of multicolor or multi-fluor cytometers can be used in multiplex analysis of vesicles, as further described below. In some embodiments, the flow cytometer can sort, and thereby collect or sort more than one population of vesicles based one or more characteristics. For example, two populations of vesicles differ in size, such that the vesicles within each population have a similar size range and can be differentially detected or sorted. In another embodiment, two different populations of vesicles are differentially labeled.

[0178] The data resulting from flow-cytometers can be plotted in 1 dimension to produce histograms or seen in 2 dimensions as dot plots or in 3 dimensions with newer software. The regions on these plots can be sequentially separated by a series of subset extractions which are termed gates. Specific gating protocols exist for diagnostic and clinical purposes especially in relation to hematology. The plots are often made on logarithmic scales. Because different fluorescent dye's emission spectra overlap, signals at the detectors have to be compensated electronically as well as computationally. Fluorophores for labeling biomarkers may include those described in Ormerod, Flow Cytometry 2nd ed., Springer-Verlag, New York (1999), and in Nida et al., Gynecologic Oncology 2005; 4 889-894 which is incorporated herein by reference. In a multiplexed assay, including but not limited to a flow cytometry assay, one or more different target molecules can be assessed, wherein at least one of the target molecules is a microvesicle surface antigen assessed using an aptamer of the invention.

[0179] Microfluidics

[0180] One or more aptamer of the invention can be disposed on any useful planar or bead substrate. In one aspect of the invention one or more aptamer of the invention is disposed on a microfluidic device, thereby facilitating assessing, characterizing or isolating a component of a biological sample comprising a polypeptide antigen of interest or a functional fragment thereof. For example, the circulating antigen or a cell, cell fragment or cell-derived vesicles comprising the antigen can be assessed using one or more aptamers of the invention (alternatively along with additional binding agents). Microfluidic devices, which may also be referred to as “lab-on-a-chip” systems, biomedical micro-electro-mechanical systems (bioMEMs), or multicomponent integrated systems, can be used for isolating and analyzing a vesicle. Such systems miniaturize and compartmentalize processes that allow for binding of vesicles, detection of biosignatures, and other processes.

[0181] A microfluidic device can also be used for isolation of a vesicle through size differential or affinity selection. For example, a microfluidic device can use one more channels for isolating a vesicle from a biological sample based on size or by using one or more binding agents for isolating a vesicle from a biological sample. A biological sample can be introduced into one or more microfluidic channels, which selectively allows the passage of a vesicle. The selection can be based on a property of the vesicle, such as the size, shape, deformability, or biosignature of the vesicle.

[0182] In one embodiment, a heterogeneous population of vesicles can be introduced into a microfluidic device, and one or more different homogeneous populations of vesicles can be obtained. For example, different channels can have different size selections or binding agents to select for different vesicle populations. Thus, a microfluidic device can isolate a plurality of vesicles wherein at least a subset of the plurality of vesicles comprises a different biosignature from another subset of the plurality of vesicles. For example, the microfluidic device can isolate at least 2, 3, 4, 5, 6, 7, 8, 9, 10, 15, 20, 25, 30, 40, 50, 60, 70, 80, 90, or 100 different subsets of vesicles, wherein each subset of vesicles comprises a different biosignature.

[0183] In some embodiments, the microfluidic device can comprise one or more channels that permit further enrichment or selection of a vesicle. A population of vesicles that has been enriched after passage through a first channel can be introduced into a second channel, which allows the passage of the desired vesicle or vesicle population to be further enriched, such as through one or more binding agents present in the second channel.

[0184] Array-based assays and bead-based assays can be used with microfluidic device. For example, the binding agent can be coupled to beads and the binding reaction between the beads and vesicle can be performed in a microfluidic device. Multiplexing can also be performed using a microfluidic device. Different compartments can comprise different binding agents for different populations of vesicles, where each population is of a different cell-of-origin specific vesicle population. In one embodiment, each population has a different biosignature. The hybridization reaction between the microsphere and vesicle can be performed in a microfluidic device and the reaction mixture can be delivered to a detection device. The detection device, such as a dual or multiple laser detection system can be part of the microfluidic system and can use a laser to identify each bead or microsphere by its color-coding, and another laser can detect the hybridization signal associated with each bead.

[0185] Any appropriate microfluidic device can be used in the methods of the invention. Examples of microfluidic devices that may be used, or adapted for use with vesicles, include but are not limited to those described in U.S. Pat. Nos. 7,591,936, 7,581,429, 7,579,136, 7,575,722, 7,568,399, 7,552,741, 7,544,506, 7,541,578, 7,518,726, 7,488,596, 7,485,214, 7,467,928, 7,452,713, 7,452,509, 7,449,096, 7,431,887, 7,422,725, 7,422,669, 7,419,822, 7,419,639, 7,413,709, 7,411,184, 7,402,229, 7,390,463, 7,381,471, 7,357,864, 7,351,592, 7,351,380, 7,338,637, 7,329,391, 7,323,140, 7,261,824, 7,258,837, 7,253,003, 7,238,324, 7,238,255, 7,233,865, 7,229,538, 7,201,881, 7,195,986, 7,189,581, 7,189,580, 7,189,368, 7,141,978, 7,138,062, 7,135,147, 7,125,711, 7,118,910, 7,118,661, 7,640,947, 7,666,361, 7,704,735; and International Patent Publication WO 2010/072410; each of which patents or applications are incorporated herein by reference in their entirety. Another example for use with methods disclosed herein is described in Chen et al., “Microfluidic isolation and transcriptome analysis of serum vesicles,” Lab on a Chip, Dec. 8, 2009 DOI: 10.1039/b916199f.

[0186] Other microfluidic devices for use with the invention include devices comprising elastomeric layers, valves and pumps, including without limitation those disclosed in U.S. Pat. Nos. 5,376,252, 6,408,878, 6,645,432, 6,719,868, 6,793,753, 6,899,137, 6,929,030, 7,040,338, 7,118,910, 7,144,616, 7,216,671, 7,250,128, 7,494,555, 7,501,245, 7,601,270, 7,691,333, 7,754,010, 7,837,946; U.S. Patent Application Nos. 2003/0061687, 2005/0084421, 2005/0112882, 2005/0129581, 2005/0145496, 2005/0201901, 2005/0214173, 2005/0252773, 2006/0006067; and EP Patent Nos. 0527905 and 1065378; each of which application is herein incorporated by reference. In some instances, much or all of the devices are composed of elastomeric material. Certain devices are designed to conduct thermal cycling reactions (e.g., PCR) with devices that include one or more elastomeric valves to regulate solution flow through the device. The devices can comprise arrays of reaction sites thereby allowing a plurality of reactions to be performed. Thus, the devices can be used to assess circulating microRNAs in a multiplex fashion, including microRNAs isolated from vesicles. In an embodiment, the microfluidic device comprises (a) a first plurality of flow channels formed in an elastomeric substrate; (b) a second plurality of flow channels formed in the elastomeric substrate that intersect the first plurality of flow channels to define an array of reaction sites, each reaction site located at an intersection of one of the first and second flow channels; (c) a plurality of isolation valves disposed along the first and second plurality of flow channels and spaced between the reaction sites that can be actuated to isolate a solution within each of the reaction sites from solutions at other reaction sites, wherein the isolation valves comprise one or more control channels that each overlay and intersect one or more of the flow channels; and (d) means for simultaneously actuating the valves for isolating the reaction sites from each other. Various modifications to the basic structure of the device are envisioned within the scope of the invention. MicroRNAs can be detected in each of the reaction sites by using PCR methods. For example, the method can comprise the steps of the steps of: (i) providing a microfluidic device, the microfluidic device comprising: a first fluidic channel having a first end and a second end in fluid communication with each other through the channel; a plurality of flow channels, each flow channel terminating at a terminal wall; wherein each flow channel branches from and is in fluid communication with the first fluidic channel, wherein an aqueous fluid that enters one of the flow channels from the first fluidic channel can flow out of the flow channel only through the first fluidic channel; and, an inlet in fluid communication with the first fluidic channel, the inlet for introducing a sample fluid; wherein each flow channel is associated with a valve that when closed isolates one end of the flow channel from the first fluidic channel, whereby an isolated reaction site is formed between the valve and the terminal wall; a control channel; wherein each the valve is a deflectable membrane which is deflected into the flow channel associated with the valve when an actuating force is applied to the control channel, thereby closing the valve; and wherein when the actuating force is applied to the control channel a valve in each of the flow channels is closed, so as to produce the isolated reaction site in each flow channel; (ii) introducing the sample fluid into the inlet, the sample fluid filling the flow channels; (iii) actuating the valve to separate the sample fluid into the separate portions within the flow channels; (iv) amplifying the nucleic acid in the sample fluid; (v) analyzing the portions of the sample fluid to determine whether the amplifying produced the reaction. The sample fluid can contain an amplifiable nucleic acid target, e.g., a microRNA, and the conditions can be polymerase chain reaction (PCR) conditions, so that the reaction results in a PCR product being formed.

[0187] The microfluidic device can have one or more binding agents attached to a surface in a channel, or present in a channel. For example, the microchannel can have one or more capture agents, such as a capture agent for a tissue related antigen in Table 4 of PCT/US2016/044595, filed Jul. 28, 2016, one or more general microvesicle antigen in Table 3 herein or a cell-of-origin or cancer related antigen in Table 4 of PCT/US2016/044595, filed Jul. 28, 2016, including without limitation EpCam, CD9, CD63, CD81, B7H3, ICAM, STEAP, KLK2, SSX2, SSX4, PBP, SPDEF, and EGFR. The capture agent may be an aptamer selected by the methods of the invention. The surface of the channel can also be contacted with a blocking aptamer. In one embodiment, a microchannel surface is treated with avidin and a capture agent, such as an antibody, that is biotinylated can be injected into the channel to bind the avidin. In other embodiments, the capture agents are present in chambers or other components of a microfluidic device. The capture agents can also be attached to beads that can be manipulated to move through the microfluidic channels. In one embodiment, the capture agents are attached to magnetic beads. The beads can be manipulated using magnets.

[0188] A biological sample can be flowed into the microfluidic device, or a microchannel, at rates such as at least about 1, 2, 3, 4, 5, 6, 7, 8, 9, 10, 11, 12, 13, 14, 15, 16, 17, 18, 19, 20, 25, 30, 35, 40, 45, or 50 μl per minute, such as between about 1-50, 5-40, 5-30, 3-20 or 5-15 μl per minute. One or more vesicles can be captured and directly detected in the microfluidic device. Alternatively, the captured vesicle may be released and exit the microfluidic device prior to analysis. In another embodiment, one or more captured vesicles are lysed in the microchannel and the lysate can be analyzed, e.g., to examine payload within the vesicles. Lysis buffer can be flowed through the channel and lyse the captured vesicles. For example, the lysis buffer can be flowed into the device or microchannel at rates such as at least about a, 2, 3, 4, 5, 6, 7, 8, 9, 10, 11, 12, 13, 14, 15, 16, 17, 18, 19, 20, 25, 26, 27, 28, 29, 30, 35, 40, 45, or 50 μl per minute, such as between about 1-50, 5-40, 10-30, 5-30 or 10-35 μl per minute. The lysate can be collected and analyzed, such as performing RT-PCR, PCR, mass spectrometry, Western blotting, or other assays, to detect one or more biomarkers of the vesicle.

### Phenotypes

[0189] Disclosed herein are products and processes for characterizing a phenotype using the methods and compositions of the invention. The term “phenotype” as used herein can mean any trait or characteristic that is attributed to a biomarker profile that is identified using in part or in whole the compositions and/or methods of the invention. For example, a phenotype can be a diagnostic, prognostic or theranostic determination based on a characterized biomarker profile for a sample obtained from a subject. A phenotype can be any observable characteristic or trait of, such as a disease or condition, a stage of a disease or condition, susceptibility to a disease or condition, prognosis of a disease stage or condition, a physiological state, or response/potential response to therapeutics. A phenotype can result from a subject's genetic makeup as well as the influence of environmental factors and the interactions between the two, as well as from epigenetic modifications to nucleic acid sequences.

[0190] A phenotype in a subject can be characterized by obtaining a biological sample from a subject and analyzing the sample using the compositions and/or methods of the invention. For example, characterizing a phenotype for a subject or individual can include detecting a disease or condition (including pre-symptomatic early stage detecting), determining a prognosis, diagnosis, or theranosis of a disease or condition, or determining the stage or progression of a disease or condition. Characterizing a phenotype can include identifying appropriate treatments or treatment efficacy for specific diseases, conditions, disease stages and condition stages, predictions and likelihood analysis of disease progression, particularly disease recurrence, metastatic spread or disease relapse. A phenotype can also be a clinically distinct type or subtype of a condition or disease, such as a cancer or tumor. Phenotype determination can also be a determination of a physiological condition, or an assessment of organ distress or organ rejection, such as post-transplantation. The compositions and methods described herein allow assessment of a subject on an individual basis, which can provide benefits of more efficient and economical decisions in treatment.

[0191] In an aspect, the invention relates to the analysis of biomarkers such as microvesicles to provide a diagnosis, prognosis, and/or theranosis of a disease or condition. Theranostics includes diagnostic testing that provides the ability to affect therapy or treatment of a disease or disease state. Theranostics testing provides a theranosis in a similar manner that diagnostics or prognostic testing provides a diagnosis or prognosis, respectively. As used herein, theranostics encompasses any desired form of therapy related testing, including predictive medicine, personalized medicine, integrated medicine, pharmacodiagnostics and Dx/Rx partnering. Therapy related tests can be used to predict and assess drug response in individual subjects, i.e., to provide personalized medicine. Predicting a drug response can be determining whether a subject is a likely responder or a likely non-responder to a candidate therapeutic agent, e.g., before the subject has been exposed or otherwise treated with the treatment. Assessing a drug response can be monitoring a response to a drug, e.g., monitoring the subject's improvement or lack thereof over a time course after initiating the treatment. Therapy related tests are useful to select a subject for treatment who is particularly likely to benefit from the treatment or to provide an early and objective indication of treatment efficacy in an individual subject. Thus, analysis using the compositions and methods of the invention may indicate that treatment should be altered to select a more promising treatment, thereby avoiding the great expense of delaying beneficial treatment and avoiding the financial and morbidity costs of administering an ineffective drug(s).

[0192] Thus, the compositions and methods of the invention may help predict whether a subject is likely to respond to a treatment for a disease or disorder. Characterizating a phenotype includes predicting the responder/non-responder status of the subject, wherein a responder responds to a treatment for a disease and a non-responder does not respond to the treatment. Biomarkers such as microvesicles can be analyzed in the subject and compared against that of previous subjects that were known to respond or not to a treatment. If the biomarker profile in the subject more closely aligns with that of previous subjects that were known to respond to the treatment, the subject can be characterized, or predicted, as a responder to the treatment. Similarly, if the biomarker profile in the subject more closely aligns with that of previous subjects that did not respond to the treatment, the subject can be characterized, or predicted as a non-responder to the treatment. The treatment can be for any appropriate disease, disorder or other condition, including without limitation those disclosed herein.

[0193] In some embodiments, the phenotype comprises a disease or condition such as those listed in Table 1. For example, the phenotype can comprise detecting the presence of or likelihood of developing a tumor, neoplasm, or cancer, or characterizing the tumor, neoplasm, or cancer (e.g., stage, grade, aggressiveness, likelihood of metastatis or recurrence, etc). Cancers that can be detected or assessed by methods or compositions described herein include, but are not limited to, breast cancer, ovarian cancer, lung cancer, colon cancer, hyperplastic polyp, adenoma, colorectal cancer, high grade dysplasia, low grade dysplasia, prostatic hyperplasia, prostate cancer, melanoma, pancreatic cancer, brain cancer (such as a glioblastoma), hematological malignancy, hepatocellular carcinoma, cervical cancer, endometrial cancer, head and neck cancer, esophageal cancer, gastrointestinal stromal tumor (GIST), renal cell carcinoma (RCC) or gastric cancer. The colorectal cancer can be CRC Dukes B or Dukes C-D. The hematological malignancy can be B-Cell Chronic Lymphocytic Leukemia, B-Cell Lymphoma-DLBCL, B-Cell Lymphoma-DLBCL-germinal center-like, B-Cell Lymphoma-DLBCL-activated B-cell-like, and Burkitt's lymphoma.

[0194] The phenotype can be a premalignant condition, such as actinic keratosis, atrophic gastritis, leukoplakia, erythroplasia, Lymphomatoid Granulomatosis, preleukemia, fibrosis, cervical dysplasia, uterine cervical dysplasia, xeroderma pigmentosum, Barrett's Esophagus, colorectal polyp, or other abnormal tissue growth or lesion that is likely to develop into a malignant tumor. Transformative viral infections such as HIV and HPV also present phenotypes that can be assessed according to the invention.

[0195] A cancer characterized by the methods of the invention can comprise, without limitation, a carcinoma, a sarcoma, a lymphoma or leukemia, a germ cell tumor, a blastoma, or other cancers. Carcinomas include without limitation epithelial neoplasms, squamous cell neoplasms squamous cell carcinoma, basal cell neoplasms basal cell carcinoma, transitional cell papillomas and carcinomas, adenomas and adenocarcinomas (glands), adenoma, adenocarcinoma, linitis plastica insulinoma, glucagonoma, gastrinoma, vipoma, cholangiocarcinoma, hepatocellular carcinoma, adenoid cystic carcinoma, carcinoid tumor of appendix, prolactinoma, oncocytoma, hurthle cell adenoma, renal cell carcinoma, grawitz tumor, multiple endocrine adenomas, endometrioid adenoma, adnexal and skin appendage neoplasms, mucoepidermoid neoplasms, cystic, mucinous and serous neoplasms, cystadenoma, pseudomyxoma peritonei, ductal, lobular and medullary neoplasms, acinar cell neoplasms, complex epithelial neoplasms, warthin's tumor, thymoma, specialized gonadal neoplasms, sex cord stromal tumor, thecoma, granulosa cell tumor, arrhenoblastoma, sertoli leydig cell tumor, glomus tumors, paraganglioma, pheochromocytoma, glomus tumor, nevi and melanomas, melanocytic nevus, malignant melanoma, melanoma, nodular melanoma, dysplastic nevus, lentigo maligna melanoma, superficial spreading melanoma, and malignant acral lentiginous melanoma. Sarcoma includes without limitation Askin's tumor, botryodies, chondrosarcoma, Ewing's sarcoma, malignant hemangio endothelioma, malignant schwannoma, osteosarcoma, soft tissue sarcomas including: alveolar soft part sarcoma, angiosarcoma, cystosarcoma phyllodes, dermatofibrosarcoma, desmoid tumor, desmoplastic small round cell tumor, epithelioid sarcoma, extraskeletal chondrosarcoma, extraskeletal osteosarcoma, fibrosarcoma, hemangiopericytoma, hemangiosarcoma, kaposi's sarcoma, leiomyosarcoma, liposarcoma, lymphangiosarcoma, lymphosarcoma, malignant fibrous histiocytoma, neurofibrosarcoma, rhabdomyosarcoma, and synovialsarcoma. Lymphoma and leukemia include without limitation chronic lymphocytic leukemia/small lymphocytic lymphoma, B-cell prolymphocytic leukemia, lymphoplasmacytic lymphoma (such as waldenstrom macroglobulinemia), splenic marginal zone lymphoma, plasma cell myeloma, plasmacytoma, monoclonal immunoglobulin deposition diseases, heavy chain diseases, extranodal marginal zone B cell lymphoma, also called malt lymphoma, nodal marginal zone B cell lymphoma (nmzl), follicular lymphoma, mantle cell lymphoma, diffuse large B cell lymphoma, mediastinal (thymic) large B cell lymphoma, intravascular large B cell lymphoma, primary effusion lymphoma, burkitt lymphoma/leukemia, T cell prolymphocytic leukemia, T cell large granular lymphocytic leukemia, aggressive NK cell leukemia, adult T cell leukemia/lymphoma, extranodal NK/T cell lymphoma, nasal type, enteropathy-type T cell lymphoma, hepatosplenic T cell lymphoma, blastic NK cell lymphoma, mycosis fungoides/sezary syndrome, primary cutaneous CD30-positive T cell lymphoproliferative disorders, primary cutaneous anaplastic large cell lymphoma, lymphomatoid papulosis, angioimmunoblastic T cell lymphoma, peripheral T cell lymphoma, unspecified, anaplastic large cell lymphoma, classical hodgkin lymphomas (nodular sclerosis, mixed cellularity, lymphocyte-rich, lymphocyte depleted or not depleted), and nodular lymphocyte-predominant hodgkin lymphoma. Germ cell tumors include without limitation germinoma, dysgerminoma, seminoma, nongerminomatous germ cell tumor, embryonal carcinoma, endodermal sinus turmor, choriocarcinoma, teratoma, polyembryoma, and gonadoblastoma. Blastoma includes without limitation nephroblastoma, medulloblastoma, and retinoblastoma. Other cancers include without limitation labial carcinoma, larynx carcinoma, hypopharynx carcinoma, tongue carcinoma, salivary gland carcinoma, gastric carcinoma, adenocarcinoma, thyroid cancer (medullary and papillary thyroid carcinoma), renal carcinoma, kidney parenchyma carcinoma, cervix carcinoma, uterine corpus carcinoma, endometrium carcinoma, chorion carcinoma, testis carcinoma, urinary carcinoma, melanoma, brain tumors such as glioblastoma, astrocytoma, meningioma, medulloblastoma and peripheral neuroectodermal tumors, gall bladder carcinoma, bronchial carcinoma, multiple myeloma, basalioma, teratoma, retinoblastoma, choroidea melanoma, seminoma, rhabdomyosarcoma, craniopharyngeoma, osteosarcoma, chondrosarcoma, myosarcoma, liposarcoma, fibrosarcoma, Ewing sarcoma, and plasmocytoma.

[0196] In a further embodiment, the cancer under analysis may be a lung cancer including non-small cell lung cancer and small cell lung cancer (including small cell carcinoma (oat cell cancer), mixed small cell/large cell carcinoma, and combined small cell carcinoma), colon cancer, breast cancer, prostate cancer, liver cancer, pancreas cancer, brain cancer, kidney cancer, ovarian cancer, stomach cancer, skin cancer, bone cancer, gastric cancer, breast cancer, pancreatic cancer, glioma, glioblastoma, hepatocellular carcinoma, papillary renal carcinoma, head and neck squamous cell carcinoma, leukemia, lymphoma, myeloma, or a solid tumor.

[0197] In embodiments, the cancer comprises an acute lymphoblastic leukemia; acute myeloid leukemia; adrenocortical carcinoma; AIDS-related cancers; AIDS-related lymphoma; anal cancer; appendix cancer; astrocytomas; atypical teratoid/rhabdoid tumor; basal cell carcinoma; bladder cancer; brain stem glioma; brain tumor (including brain stem glioma, central nervous system atypical teratoid/rhabdoid tumor, central nervous system embryonal tumors, astrocytomas, craniopharyngioma, ependymoblastoma, ependymoma, medulloblastoma, medulloepithelioma, pineal parenchymal tumors of intermediate differentiation, supratentorial primitive neuroectodermal tumors and pineoblastoma); breast cancer; bronchial tumors; Burkitt lymphoma; cancer of unknown primary site; carcinoid tumor; carcinoma of unknown primary site; central nervous system atypical teratoid/rhabdoid tumor; central nervous system embryonal tumors; cervical cancer; childhood cancers; chordoma; chronic lymphocytic leukemia; chronic myelogenous leukemia; chronic myeloproliferative disorders; colon cancer; colorectal cancer; craniopharyngioma; cutaneous T-cell lymphoma; endocrine pancreas islet cell tumors; endometrial cancer; ependymoblastoma; ependymoma; esophageal cancer; esthesioneuroblastoma; Ewing sarcoma; extracranial germ cell tumor; extragonadal germ cell tumor; extrahepatic bile duct cancer; gallbladder cancer; gastric (stomach) cancer; gastrointestinal carcinoid tumor; gastrointestinal stromal cell tumor; gastrointestinal stromal tumor (GIST); gestational trophoblastic tumor; glioma; hairy cell leukemia; head and neck cancer; heart cancer; Hodgkin lymphoma; hypopharyngeal cancer; intraocular melanoma; islet cell tumors; Kaposi sarcoma; kidney cancer; Langerhans cell histiocytosis; laryngeal cancer; lip cancer; liver cancer; malignant fibrous histiocytoma bone cancer; medulloblastoma; medulloepithelioma; melanoma; Merkel cell carcinoma; Merkel cell skin carcinoma; mesothelioma; metastatic squamous neck cancer with occult primary; mouth cancer; multiple endocrine neoplasia syndromes; multiple myeloma; multiple myeloma/plasma cell neoplasm; mycosis fungoides; myelodysplastic syndromes; myeloproliferative neoplasms; nasal cavity cancer; nasopharyngeal cancer; neuroblastoma; Non-Hodgkin lymphoma; nonmelanoma skin cancer; non-small cell lung cancer; oral cancer; oral cavity cancer; oropharyngeal cancer; osteosarcoma; other brain and spinal cord tumors; ovarian cancer; ovarian epithelial cancer; ovarian germ cell tumor; ovarian low malignant potential tumor; pancreatic cancer; papillomatosis; paranasal sinus cancer; parathyroid cancer; pelvic cancer; penile cancer; pharyngeal cancer; pineal parenchymal tumors of intermediate differentiation; pineoblastoma; pituitary tumor; plasma cell neoplasm/multiple myeloma; pleuropulmonary blastoma; primary central nervous system (CNS) lymphoma; primary hepatocellular liver cancer; prostate cancer; rectal cancer; renal cancer; renal cell (kidney) cancer; renal cell cancer; respiratory tract cancer; retinoblastoma; rhabdomyosarcoma; salivary gland cancer; Sezary syndrome; small cell lung cancer; small intestine cancer; soft tissue sarcoma; squamous cell carcinoma; squamous neck cancer; stomach (gastric) cancer; supratentorial primitive neuroectodermal tumors; T-cell lymphoma; testicular cancer; throat cancer; thymic carcinoma; thymoma; thyroid cancer; transitional cell cancer; transitional cell cancer of the renal pelvis and ureter; trophoblastic tumor; ureter cancer; urethral cancer; uterine cancer; uterine sarcoma; vaginal cancer; vulvar cancer; Waldenstrom macroglobulinemia; or Wilm's tumor. The methods of the invention can be used to characterize these and other cancers. Thus, characterizing a phenotype can be providing a diagnosis, prognosis or theranosis of one of the cancers disclosed herein.

[0198] In some embodiments, the cancer comprises an acute myeloid leukemia (AML), breast carcinoma, cholangiocarcinoma, colorectal adenocarcinoma, extrahepatic bile duct adenocarcinoma, female genital tract malignancy, gastric adenocarcinoma, gastroesophageal adenocarcinoma, gastrointestinal stromal tumors (GIST), glioblastoma, head and neck squamous carcinoma, leukemia, liver hepatocellular carcinoma, low grade glioma, lung bronchioloalveolar carcinoma (BAC), lung non-small cell lung cancer (NSCLC), lung small cell cancer (SCLC), lymphoma, male genital tract malignancy, malignant solitary fibrous tumor of the pleura (MSFT), melanoma, multiple myeloma, neuroendocrine tumor, nodal diffuse large B-cell lymphoma, non epithelial ovarian cancer (non-EOC), ovarian surface epithelial carcinoma, pancreatic adenocarcinoma, pituitary carcinomas, oligodendroglioma, prostatic adenocarcinoma, retroperitoneal or peritoneal carcinoma, retroperitoneal or peritoneal sarcoma, small intestinal malignancy, soft tissue tumor, thymic carcinoma, thyroid carcinoma, or uveal melanoma. The methods of the invention can be used to characterize these and other cancers. Thus, characterizing a phenotype can be providing a diagnosis, prognosis or theranosis of one of the cancers disclosed herein.

[0199] The phenotype can also be an inflammatory disease, immune disease, or autoimmune disease. For example, the disease may be inflammatory bowel disease (IBD), Crohn's disease (CD), ulcerative colitis (UC), pelvic inflammation, vasculitis, psoriasis, diabetes, autoimmune hepatitis, Multiple Sclerosis, Myasthenia Gravis, Type I diabetes, Rheumatoid Arthritis, Psoriasis, Systemic Lupus Erythematosis (SLE), Hashimoto's Thyroiditis, Grave's disease, Ankylosing Spondylitis Sjogrens Disease, CREST syndrome, Scleroderma, Rheumatic Disease, organ rejection, Primary Sclerosing Cholangitis, or sepsis.

[0200] The phenotype can also comprise a cardiovascular disease, such as atherosclerosis, congestive heart failure, vulnerable plaque, stroke, or ischemia. The cardiovascular disease or condition can be high blood pressure, stenosis, vessel occlusion or a thrombotic event.

[0201] The phenotype can also comprise a neurological disease, such as Multiple Sclerosis (MS), Parkinson's Disease (PD), Alzheimer's Disease (AD), schizophrenia, bipolar disorder, depression, autism, Prion Disease, Pick's disease, dementia, Huntington disease (HD), Down's syndrome, cerebrovascular disease, Rasmussen's encephalitis, viral meningitis, neurospsychiatric systemic lupus erythematosus (NPSLE), amyotrophic lateral sclerosis, Creutzfeldt-Jacob disease, Gerstmann-Straussler-Scheinker disease, transmissible spongiform encephalopathy, ischemic reperfusion damage (e.g. stroke), brain trauma, microbial infection, or chronic fatigue syndrome. The phenotype may also be a condition such as fibromyalgia, chronic neuropathic pain, or peripheral neuropathic pain.

[0202] The phenotype may also comprise an infectious disease, such as a bacterial, viral or yeast infection. For example, the disease or condition may be Whipple's Disease, Prion Disease, cirrhosis, methicillin-resistant Staphylococcus aureus, HIV, hepatitis, syphilis, meningitis, malaria, tuberculosis, or influenza. Viral proteins, such as HIV or HCV-like particles can be assessed in a vesicle, to characterize a viral condition.

[0203] The phenotype can also comprise a perinatal or pregnancy related condition (e.g. preeclampsia or preterm birth), metabolic disease or condition, such as a metabolic disease or condition associated with iron metabolism. For example, hepcidin can be assayed in a vesicle to characterize an iron deficiency. The metabolic disease or condition can also be diabetes, inflammation, or a perinatal condition.

[0204] The compositions and methods of the invention can be used to characterize these and other diseases and disorders that can be assessed via biomarkers. Thus, characterizing a phenotype can be providing a diagnosis, prognosis or theranosis of one of the diseases and disorders disclosed herein.

### Subject

[0205] One or more phenotypes of a subject can be determined by analyzing one or more vesicles, such as vesicles, in a biological sample obtained from the subject. A subject or patient can include, but is not limited to, mammals such as bovine, avian, canine, equine, feline, ovine, porcine, or primate animals (including humans and non-human primates). A subject can also include a mammal of importance due to being endangered, such as a Siberian tiger; or economic importance, such as an animal raised on a farm for consumption by humans, or an animal of social importance to humans, such as an animal kept as a pet or in a zoo. Examples of such animals include, but are not limited to, carnivores such as cats and dogs; swine including pigs, hogs and wild boars; ruminants or ungulates such as cattle, oxen, sheep, giraffes, deer, goats, bison, camels or horses. Also included are birds that are endangered or kept in zoos, as well as fowl and more particularly domesticated fowl, i.e. poultry, such as turkeys and chickens, ducks, geese, guinea fowl. Also included are domesticated swine and horses (including race horses). In addition, any animal species connected to commercial activities are also included such as those animals connected to agriculture and aquaculture and other activities in which disease monitoring, diagnosis, and therapy selection are routine practice in husbandry for economic productivity and/or safety of the food chain.

[0206] The subject can have a pre-existing disease or condition, such as cancer. Alternatively, the subject may not have any known pre-existing condition. The subject may also be non-responsive to an existing or past treatment, such as a treatment for cancer.

### Samples

[0207] A sample used and/or assessed via the compositions and methods of the invention includes any relevant biological sample that can be used for biomarker assessment, including without limitation sections of tissues such as biopsy or tissue removed during surgical or other procedures, bodily fluids, autopsy samples, frozen sections taken for histological purposes, and cell cultures. Such samples include blood and blood fractions or products (e.g., serum, buffy coat, plasma, platelets, red blood cells, and the like), sputum, malignant effusion, cheek cells tissue, cultured cells (e.g., primary cultures, explants, and transformed cells), stool, urine, other biological or bodily fluids (e.g., prostatic fluid, gastric fluid, intestinal fluid, renal fluid, lung fluid, cerebrospinal fluid, and the like), etc. The sample can comprise biological material that is a fresh frozen & formalin fixed paraffin embedded (FFPE) block, formalin-fixed paraffin embedded, or is within an RNA preservative+formalin fixative. More than one sample of more than one type can be used for each patient.

[0208] The sample used in the methods described herein can be a formalin fixed paraffin embedded (FFPE) sample. The FFPE sample can be one or more of fixed tissue, unstained slides, bone marrow core or clot, core needle biopsy, malignant fluids and fine needle aspirate (FNA). In an embodiment, the fixed tissue comprises a tumor containing formalin fixed paraffin embedded (FFPE) block from a surgery or biopsy. In another embodiment, the unstained slides comprise unstained, charged, unbaked slides from a paraffin block. In another embodiment, bone marrow core or clot comprises a decalcified core. A formalin fixed core and/or clot can be paraffin-embedded. In still another embodiment, the core needle biopsy comprises 1, 2, 3, 4, 5, 6, 7, 8, 9, 10 or more, e.g., 3-4, paraffin embedded biopsy samples. An 18 gauge needle biopsy can be used. The malignant fluid can comprise a sufficient volume of fresh pleural/ascitic fluid to produce a 5×5×2 mm cell pellet. The fluid can be formalin fixed in a paraffin block. In an embodiment, the core needle biopsy comprises 1, 2, 3, 4, 5, 6, 7, 8, 9, 10 or more, e.g., 4-6, paraffin embedded aspirates.

[0209] A sample may be processed according to techniques understood by those in the art. A sample can be without limitation fresh, frozen or fixed cells or tissue. In some embodiments, a sample comprises formalin-fixed paraffin-embedded (FFPE) tissue, fresh tissue or fresh frozen (FF) tissue. A sample can comprise cultured cells, including primary or immortalized cell lines derived from a subject sample. A sample can also refer to an extract from a sample from a subject. For example, a sample can comprise DNA, RNA or protein extracted from a tissue or a bodily fluid. Many techniques and commercial kits are available for such purposes. The fresh sample from the individual can be treated with an agent to preserve RNA prior to further processing, e.g., cell lysis and extraction. Samples can include frozen samples collected for other purposes. Samples can be associated with relevant information such as age, gender, and clinical symptoms present in the subject; source of the sample; and methods of collection and storage of the sample. A sample is typically obtained from a subject.

[0210] A biopsy comprises the process of removing a tissue sample for diagnostic or prognostic evaluation, and to the tissue specimen itself. Any biopsy technique known in the art can be applied to the molecular profiling methods of the present invention. The biopsy technique applied can depend on the tissue type to be evaluated (e.g., colon, prostate, kidney, bladder, lymph node, liver, bone marrow, blood cell, lung, breast, etc.), the size and type of the tumor (e.g., solid or suspended, blood or ascites), among other factors. Representative biopsy techniques include, but are not limited to, excisional biopsy, incisional biopsy, needle biopsy, surgical biopsy, and bone marrow biopsy. An “excisional biopsy” refers to the removal of an entire tumor mass with a small margin of normal tissue surrounding it. An “incisional biopsy” refers to the removal of a wedge of tissue that includes a cross-sectional diameter of the tumor. Molecular profiling can use a “core-needle biopsy” of the tumor mass, or a “fine-needle aspiration biopsy” which generally obtains a suspension of cells from within the tumor mass. Biopsy techniques are discussed, for example, in Harrison's Principles of Internal Medicine, Kasper, et al., eds., 16th ed., 2005, Chapter 70, and throughout Part V.

[0211] Standard molecular biology techniques known in the art and not specifically described are generally followed as in Sambrook et al., Molecular Cloning: A Laboratory Manual, Cold Spring Harbor Laboratory Press, New York (1989), and as in Ausubel et al., Current Protocols in Molecular Biology, John Wiley and Sons, Baltimore, Md. (1989) and as in Perbal, A Practical Guide to Molecular Cloning, John Wiley & Sons, New York (1988), and as in Watson et al., Recombinant DNA, Scientific American Books, New York and in Birren et al (eds) Genome Analysis: A Laboratory Manual Series, Vols. 1-4 Cold Spring Harbor Laboratory Press, New York (1998) and methodology as set forth in U.S. Pat. Nos. 4,666,828; 4,683,202; 4,801,531; 5,192,659 and 5,272,057 and incorporated herein by reference. Polymerase chain reaction (PCR) can be carried out generally as in PCR Protocols: A Guide to Methods and Applications, Academic Press, San Diego, Calif. (1990).

[0212] The biological sample assessed using the compositions and methods of the invention can be any useful bodily or biological fluid, including but not limited to peripheral blood, sera, plasma, ascites, urine, cerebrospinal fluid (CSF), sputum, saliva, bone marrow, synovial fluid, aqueous humor, amniotic fluid, cerumen, breast milk, broncheoalveolar lavage fluid, semen (including prostatic fluid), Cowper's fluid or pre-ejaculatory fluid, female ejaculate, sweat, fecal matter, hair, tears, cyst fluid, pleural and peritoneal fluid, pericardial fluid, lymph, chyme, chyle, bile, interstitial fluid, menses, pus, sebum, vomit, vaginal secretions, mucosal secretion, stool water, pancreatic juice, lavage fluids from sinus cavities, bronchopulmonary aspirates or other lavage fluids, cells, cell culture, or a cell culture supernatant. A biological sample may also include the blastocyl cavity, umbilical cord blood, or maternal circulation which may be of fetal or maternal origin. The biological sample may also be a cell culture, tissue sample or biopsy from which vesicles and other circulating biomarkers may be obtained. For example, cells of interest can be cultured and vesicles isolated from the culture. In various embodiments, biomarkers or more particularly biosignatures disclosed herein can be assessed directly from such biological samples (e.g., identification of presence or levels of nucleic acid or polypeptide biomarkers or functional fragments thereof) using various methods, such as extraction of nucleic acid molecules from blood, plasma, serum or any of the foregoing biological samples, use of protein or antibody arrays to identify polypeptide (or functional fragment) biomarker(s), as well as other array, sequencing, PCR and proteomic techniques known in the art for identification and assessment of nucleic acid and polypeptide molecules. In addition, one or more components present in such samples can be first isolated or enriched and further processed to assess the presence or levels of selected biomarkers, to assess a given biosignature (e.g., isolated microvesicles prior to profiling for protein and/or nucleic acid biomarkers).

[0213] Table 1 presents a non-limiting listing of diseases, conditions, or biological states and corresponding biological samples that may be used for analysis according to the methods of the invention.

TABLE 1
Examples of Biological Samples for Various Diseases, Conditions, or Biological States

| Illustrative Disease, Condition or Biological State | Illustrative Biological Samples |
|---|---|
| Cancers/neoplasms affecting the following tissue | Tumor, blood, serum, plasma, cerebrospinal fluid |
| types/bodily systems: breast, lung, ovarian, colon, | (CSF), urine, sputum, ascites, synovial fluid, |
| rectal, prostate, pancreatic, brain, bone, connective | semen, nipple aspirates, saliva, bronchoalveolar |
| tissue, glands, skin, lymph, nervous system, | lavage fluid, tears, oropharyngeal washes, feces, |
| endocrine, germ cell, genitourinary, | peritoneal fluids, pleural effusion, sweat, tears, |
| hematologic/blood, bone marrow, muscle, eye, | aqueous humor, pericardial fluid, lymph, chyme, |
| esophageal, fat tissue, thyroid, pituitary, spinal | chyle, bile, stool water, amniotic fluid, breast milk, |
| cord, bile duct, heart, gall bladder, bladder, testes, | pancreatic juice, cerumen, Cowper's fluid or pre- |
| cervical, endometrial, renal, ovarian, | ejaculatory fluid, female ejaculate, interstitial fluid, |
| digestive/gastrointestinal, stomach, head and neck, | menses, mucus, pus, sebum, vaginal lubrication, |
| liver, leukemia, respiratory/thorasic, cancers of | vomit |
| unknown primary (CUP) | |
| Neurodegenerative/neurological disorders: | Blood, serum, plasma, CSF, urine |
| Parkinson's disease, Alzheimer's Disease and | |
| multiple sclerosis, Schizophrenia, and bipolar | |
| disorder, spasticity disorders, epilepsy | |
| Cardiovascular Disease: atherosclerosis, | Blood, serum, plasma, CSF, urine |
| cardiomyopathy, endocarditis, vunerable plaques, | |
| infection | |
| Stroke: ischemic, intracerebral hemorrhage, | Blood, serum, plasma, CSF, urine |
| subarachnoid hemorrhage, transient ischemic | |
| attacks (TIA) | |
| Pain disorders: peripheral neuropathic pain and | Blood, serum, plasma, CSF, urine |
| chronic neuropathic pain, and fibromyalgia, | |
| Autoimmune disease: systemic and localized | Blood, serum, plasma, CSF, urine, synovial fluid |
| diseases, rheumatic disease, Lupus, Sjogren's | |
| syndrome | |
| Digestive system abnormalities: Barrett's | Blood, serum, plasma, CSF, urine |
| esophagus, irritable bowel syndrome, ulcerative | |
| colitis, Crohn's disease, Diverticulosis and | |
| Diverticulitis, Celiac Disease | |
| Endocrine disorders: diabetes mellitus, various | Blood, serum, plasma, CSF, urine |
| forms of Thyroiditis, adrenal disorders, pituitary | |
| disorders | |
| Diseases and disorders of the skin: psoriasis | Blood, serum, plasma, CSF, urine, synovial fluid, |
| | tears |
| Urological disorders: benign prostatic hypertrophy | Blood, serum, plasma, urine |
| (BPH), polycystic kidney disease, interstitial | |
| cystitis | |
| Hepatic disease/injury: Cirrhosis, induced | Blood, serum, plasma, urine |
| hepatotoxicity (due to exposure to natural or | |
| synthetic chemical sources) | |
| Kidney disease/injury: acute, sub-acute, chronic | Blood, serum, plasma, urine |
| conditions, Podocyte injury, focal segmental | |
| glomerulosclerosis | |
| Endometriosis | Blood, serum, plasma, urine, vaginal fluids |
| Osteoporosis | Blood, serum, plasma, urine, synovial fluid |
| Pancreatitis | Blood, serum, plasma, urine, pancreatic juice |
| Asthma | Blood, serum, plasma, urine, sputum, bronchiolar |
| | lavage fluid |
| Allergies | Blood, serum, plasma, urine, sputum, bronchiolar |
| | lavage fluid |
| Prion-related diseases | Blood, serum, plasma, CSF, urine |
| Viral Infections: HIV/AIDS | Blood, serum, plasma, urine |
| Sepsis | Blood, serum, plasma, urine, tears, nasal lavage |
| Organ rejection/transplantation | Blood, serum, plasma, urine, various lavage fluids |
| Differentiating conditions: adenoma versus | Blood, serum, plasma, urine, sputum, feces, colonic |
| hyperplastic polyp, irritable bowel syndrome (IBS) | lavage fluid |
| versus normal, classifying Dukes stages A, B, C, | |
| and/or D of colon cancer, adenoma with low-grade | |
| hyperplasia versus high-grade hyperplasia, | |
| adenoma versus normal, colorectal cancer versus | |
| normal, IBS versus. ulcerative colitis (UC) versus | |
| Crohn's disease (CD), | |
| Pregnancy related physiological states, conditions, | Maternal serum, plasma, amniotic fluid, cord blood |
| or affiliated diseases: genetic risk, adverse | |
| pregnancy outcomes | |

[0214] The methods of the invention can be used to characterize a phenotype using a blood sample or blood derivative. Blood derivatives include plasma and serum. Blood plasma is the liquid component of whole blood, and makes up approximately 55% of the total blood volume. It is composed primarily of water with small amounts of minerals, salts, ions, nutrients, and proteins in solution. In whole blood, red blood cells, leukocytes, and platelets are suspended within the plasma. Blood serum refers to blood plasma without fibrinogen or other clotting factors (i.e., whole blood minus both the cells and the clotting factors).

[0215] The biological sample may be obtained through a third party, such as a party not performing the analysis of the biomarkers, whether direct assessment of a biological sample or by profiling one or more vesicles obtained from the biological sample. For example, the sample may be obtained through a clinician, physician, or other health care manager of a subject from which the sample is derived.

[0216] Alternatively, the biological sample may obtained by the same party analyzing the vesicle. In addition, biological samples be assayed, are archived (e.g., frozen) or ortherwise stored in under preservative conditions.

[0217] Furthermore, a biological sample can comprise a vesicle or cell membrane fragment that is derived from a cell of origin and available extracellularly in a subject's biological fluid or extracellular milieu.

[0218] Methods of the invention can include assessing one or more vesicles, including assessing vesicle populations. A vesicle, as used herein, is a membrane vesicle that is shed from cells. Vesicles or membrane vesicles include without limitation: circulating microvesicles (cMVs), microvesicle, exosome, nanovesicle, dexosome, bleb, blebby, prostasome, microparticle, intralumenal vesicle, membrane fragment, intralumenal endosomal vesicle, endosomal-like vesicle, exocytosis vehicle, endosome vesicle, endosomal vesicle, apoptotic body, multivesicular body, secretory vesicle, phospholipid vesicle, liposomal vesicle, argosome, texasome, secresome, tolerosome, melanosome, oncosome, or exocytosed vehicle. Furthermore, although vesicles may be produced by different cellular processes, the methods of the invention are not limited to or reliant on any one mechanism, insofar as such vesicles are present in a biological sample and are capable of being characterized by the methods disclosed herein. Unless otherwise specified, methods that make use of a species of vesicle can be applied to other types of vesicles. Vesicles comprise spherical structures with a lipid bilayer similar to cell membranes which surrounds an inner compartment which can contain soluble components, sometimes referred to as the payload. In some embodiments, the methods of the invention make use of exosomes, which are small secreted vesicles of about 40-100 nm in diameter. For a review of membrane vesicles, including types and characterizations, see Thery et al., Nat Rev Immunol. 2009 August; 9(8):581-93. Some properties of different types of vesicles include those in Table 2:

TABLE 2
Vesicle Properties

| | | | | Membrane | Exosome- | Apoptotic |
|---|---|---|---|---|---|---|
| Feature | Exosomes | Microvesicles | Ectosomes | particles | like vesicles | vesicles |
| Size | 50-100 nm | 100-1,000 nm | 50-200 nm | 50-80 nm | 20-50 nm | 50-500 nm |
| Density in | 1.13-1.19 g/ml | | | 1.04-1.07 g/ml | 1.1 g/ml | 1.16-1.28 g/ml |
| sucrose | | | | | | |
| EM | Cup shape | Irregular | Bilamellar | Round | Irregular | Heterogeneous |
| appearance | | shape, | round | | shape | |
| | | electron | structures | | | |
| | | dense | | | | |
| Sedimentation | 100,000 g | 10,000 g | 160,000-200,000 g | 100,000-200,000 g | 175,000 g | 1,200 g, |
| | | | | | | 10,000 g, |
| | | | | | | 100,000 g |
| Lipid | Enriched in | Expose PPS | Enriched in | | No lipid | |
| composition | cholesterol, | | cholesterol | | rafts | |
| | sphingomyelin | | and | | | |
| | and ceramide; | | diacylglycerol; | | | |
| | contains lipid | | expose PPS | | | |
| | rafts; expose | | | | | |
| | PPS | | | | | |
| Major protein | Tetraspanins | Integrins, | CR1 and | CD133; no | TNFRI | Histones |
| markers | (e.g., CD63, | selectins and | proteolytic | CD63 | | |
| | CD9), Alix, | CD40 ligand | enzymes; no | | | |
| | TSG101 | | CD63 | | | |
| Intracellular | Internal | Plasma | Plasma | Plasma | | |
| origin | compartments | membrane | membrane | membrane | | |
| | (endosomes) | | | | | |

Abbreviations:
phosphatidylserine (PPS);
electron microscopy (EM)

[0219] Vesicles include shed membrane bound particles, or “microparticles,” that are derived from either the plasma membrane or an internal membrane. Vesicles can be released into the extracellular environment from cells. Cells releasing vesicles include without limitation cells that originate from, or are derived from, the ectoderm, endoderm, or mesoderm. The cells may have undergone genetic, environmental, and/or any other variations or alterations. For example, the cell can be tumor cells. A vesicle can reflect any changes in the source cell, and thereby reflect changes in the originating cells, e.g., cells having various genetic mutations. In one mechanism, a vesicle is generated intracellularly when a segment of the cell membrane spontaneously invaginates and is ultimately exocytosed (see for example, Keller et al., Immunol. Lett. 107 (2): 102-8 (2006)). Vesicles also include cell-derived structures bounded by a lipid bilayer membrane arising from both herniated evagination (blebbing) separation and sealing of portions of the plasma membrane or from the export of any intracellular membrane-bounded vesicular structure containing various membrane-associated proteins of tumor origin, including surface-bound molecules derived from the host circulation that bind selectively to the tumor-derived proteins together with molecules contained in the vesicle lumen, including but not limited to tumor-derived microRNAs or intracellular proteins. Blebs and blebbing are further described in Charras et al., Nature Reviews Molecular and Cell Biology, Vol. 9, No. 11, p. 730-736 (2008). A vesicle shed into circulation or bodily fluids from tumor cells may be referred to as a “circulating tumor-derived vesicle.” When such vesicle is an exosome, it may be referred to as a circulating-tumor derived exosome (CTE). In some instances, a vesicle can be derived from a specific cell of origin. CTE, as with a cell-of-origin specific vesicle, typically have one or more unique biomarkers that permit isolation of the CTE or cell-of-origin specific vesicle, e.g., from a bodily fluid and sometimes in a specific manner. For example, a cell or tissue specific markers are used to identify the cell of origin. Examples of such cell or tissue specific markers are disclosed herein and can further be accessed in the Tissue-specific Gene Expression and Regulation (TiGER) Database, available at bioinfo.wilmer.jhu.edu/tiger/; Liu et al. (2008) TiGER: a database for tissue-specific gene expression and regulation. BMC Bioinformatics. 9:271; TissueDistributionDBs, available at genome.dkfz-heidelberg.de/menu/tissue_db/index.html.

[0220] A vesicle can have a diameter of greater than about 10 nm, 20 nm, or 30 nm. A vesicle can have a diameter of greater than 40 nm, 50 nm, 100 nm, 200 nm, 500 nm, 1000 nm, 1500 nm, 2000 nm or greater than 10,000 nm. A vesicle can have a diameter of about 20-2000 nm, about 20-1500 nm, about 30-1000 nm, about 30-800 nm, about 30-200 nm, or about 30-100 nm. In some embodiments, the vesicle has a diameter of less than 10,000 nm, 2000 nm, 1500 nm, 1000 nm, 800 nm, 500 nm, 200 nm, 100 nm, 50 nm, 40 nm, 30 nm, 20 nm or less than 10 nm. As used herein the term “about” in reference to a numerical value means that variations of 10% above or below the numerical value are within the range ascribed to the specified value. Typical sizes for various types of vesicles are shown in Table 2. Vesicles can be assessed to measure the diameter of a single vesicle or any number of vesicles. For example, the range of diameters of a vesicle population or an average diameter of a vesicle population can be determined. Vesicle diameter can be assessed using methods known in the art, e.g., imaging technologies such as electron microscopy. In an embodiment, a diameter of one or more vesicles is determined using optical particle detection. See, e.g., U.S. Pat. No. 7,751,053, entitled “Optical Detection and Analysis of Particles” and issued Jul. 6, 2010; and U.S. Pat. No. 7,399,600, entitled “Optical Detection and Analysis of Particles” and issued Jul. 15, 2010.

[0221] In some embodiments, the methods of the invention comprise assessing vesicles directly such as in a biological sample without prior isolation, purification, or concentration from the biological sample. For example, the amount of vesicles in the sample can by itself provide a biosignature that provides a diagnostic, prognostic or theranostic determination. Alternatively, the vesicle in the sample may be isolated, captured, purified, or concentrated from a sample prior to analysis. As noted, isolation, capture or purification as used herein comprises partial isolation, partial capture or partial purification apart from other components in the sample. Vesicle isolation can be performed using various techniques as described herein, e.g., chromatography, filtration, centrifugation, flow cytometry, affinity capture (e.g., to a planar surface or bead), and/or using microfluidics. FIGS. 12B-C present an overview of a method of the invention for assessing microvesicles using an aptamer pool.

[0222] Vesicles such as exosomes can be assessed to provide a phenotypic characterization by comparing vesicle characteristics to a reference. In some embodiments, surface antigens on a vesicle are assessed. The surface antigens can provide an indication of the anatomical origin and/or cellular of the vesicles and other phenotypic information, e.g., tumor status. For example, wherein vesicles found in a patient sample, e.g., a bodily fluid such as blood, serum or plasma, are assessed for surface antigens indicative of colorectal origin and the presence of cancer. The surface antigens may comprise any informative biological entity that can be detected on the vesicle membrane surface, including without limitation surface proteins, lipids, carbohydrates, and other membrane components. For example, positive detection of colon derived vesicles expressing tumor antigens can indicate that the patient has colorectal cancer. As such, methods of the invention can be used to characterize any disease or condition associated with an anatomical or cellular origin, by assessing, for example, disease-specific and cell-specific biomarkers of one or more vesicles obtained from a subject.

[0223] In another embodiment, the methods of the invention comprise assessing one or more vesicle payload to provide a phenotypic characterization. The payload with a vesicle comprises any informative biological entity that can be detected as encapsulated within the vesicle, including without limitation proteins and nucleic acids, e.g., genomic or cDNA, mRNA, or functional fragments thereof, as well as microRNAs (miRs). In addition, methods of the invention are directed to detecting vesicle surface antigens (in addition or exclusive to vesicle payload) to provide a phenotypic characterization. For example, vesicles can be characterized by using binding agents (e.g., antibodies or aptamers) that are specific to vesicle surface antigens, and the bound vesicles can be further assessed to identify one or more payload components disclosed therein. As described herein, the levels of vesicles with surface antigens of interest or with payload of interest can be compared to a reference to characterize a phenotype. For example, overexpression in a sample of cancer-related surface antigens or vesicle payload, e.g., a tumor associated mRNA or microRNA, as compared to a reference, can indicate the presence of cancer in the sample. The biomarkers assessed can be present or absent, increased or reduced based on the selection of the desired target sample and comparison of the target sample to the desired reference sample. Non-limiting examples of target samples include: disease; treated/not-treated; different time points, such as a in a longitudinal study; and non-limiting examples of reference sample: non-disease; normal; different time points; and sensitive or resistant to candidate treatment(s).

### Microvesicle Isolation and Analysis

[0224] Sample Processing

[0225] A vesicle or a population of vesicles may be isolated, purified, concentrated or otherwise enriched prior to and/or during analysis. Unless otherwise specified, the terms “purified,” “isolated,” or similar as used herein in reference to vesicles or biomarker components are intended to include partial or complete purification or isolation of such components from a cell or organism. Analysis of a vesicle can include quantitating the amount one or more vesicle populations of a biological sample. For example, a heterogeneous population of vesicles can be quantitated, or a homogeneous population of vesicles, such as a population of vesicles with a particular biomarker profile, a particular biosignature, or derived from a particular cell type can be isolated from a heterogeneous population of vesicles and quantitated. Analysis of a vesicle can also include detecting, quantitatively or qualitatively, one or more particular biomarker profile or biosignature of a vesicle, as described herein.

[0226] A vesicle can be stored and archived, such as in a bio-fluid bank and retrieved for analysis as desired. A vesicle may also be isolated from a biological sample that has been previously harvested and stored from a living or deceased subject. In addition, a vesicle may be isolated from a biological sample which has been collected as described in King et al., Breast Cancer Res 7(5): 198-204 (2005). A vesicle can be isolated from an archived or stored sample. Alternatively, a vesicle may be isolated from a biological sample and analyzed without storing or archiving of the sample. Furthermore, a third party may obtain or store the biological sample, or obtain or store the vesicle for analysis.

[0227] An enriched population of vesicles can be obtained from a biological sample. For example, vesicles may be concentrated or isolated from a biological sample using size exclusion chromatography, density gradient centrifugation, differential centrifugation, nanomembrane ultrafiltration, immunoabsorbent capture, affinity purification, microfluidic separation, or combinations thereof.

[0228] Size exclusion chromatography, such as gel permeation columns, centrifugation or density gradient centrifugation, and filtration methods can be used. For example, a vesicle can be isolated by differential centrifugation, anion exchange and/or gel permeation chromatography (for example, as described in U.S. Pat. Nos. 6,899,863 and 6,812,023), sucrose density gradients, organelle electrophoresis (for example, as described in U.S. Pat. No. 7,198,923), magnetic activated cell sorting (MACS), or with a nanomembrane ultrafiltration concentrator. Various combinations of isolation or concentration methods can be used.

[0229] Highly abundant proteins, such as albumin and immunoglobulin in blood samples, may hinder isolation of vesicles from a biological sample. For example, a vesicle can be isolated from a biological sample using a system that uses multiple antibodies that are specific to the most abundant proteins found in a biological sample, such as blood. Such a system can remove up to several proteins at once, thus unveiling the lower abundance species such as cell-of-origin specific vesicles. This type of system can be used for isolation of vesicles from biological samples such as blood, cerebrospinal fluid or urine. The isolation of vesicles from a biological sample may also be enhanced by high abundant protein removal methods as described in Chromy et al. J Proteome Res 2004; 3:1120-1127. In another embodiment, the isolation of vesicles from a biological sample may also be enhanced by removing serum proteins using glycopeptide capture as described in Zhang et al, Mol Cell Proteomics 2005; 4:144-155. In addition, vesicles from a biological sample such as urine may be isolated by differential centrifugation followed by contact with antibodies directed to cytoplasmic or anti-cytoplasmic epitopes as described in Pisitkun et al., Proc Natl Acad Sci USA, 2004; 101:13368-13373.

[0230] Plasma contains a large variety of proteins including albumin, immunoglobulins, and clotting proteins such as fibrinogen. About 60% of plasma protein comprises the protein albumin (e.g., human serum albumin or HSA), which contributes to osmotic pressure of plasma to assist in the transport of lipids and steroid hormones. Globulins make up about 35% of plasma proteins and are used in the transport of ions, hormones and lipids assisting in immune function. About 4% of plasma protein comprises fibrinogen which is essential in the clotting of blood and can be converted into the insoluble protein fibrin. Other types of blood proteins include: Prealbumin, Alpha 1 antitrypsin, Alpha 1 acid glycoprotein, Alpha 1 fetoprotein, Haptoglobin, Alpha 2 macroglobulin, Ceruloplasmin, Transferrin, complement proteins C3 and C4, Beta 2 microglobulin, Beta lipoprotein, Gamma globulin proteins, C-reactive protein (CRP), Lipoproteins (chylomicrons, VLDL, LDL, HDL), other globulins (types alpha, beta and gamma), Prothrombin and Mannose-binding lectin (MBL). Any of these proteins, including classes of proteins, or derivatives thereof (such as fibrin which is derived from the cleavage of fibrinogen) can be selectively depleted from a biological sample prior to further analysis performed on the sample. Without being bound by theory, removal of such background proteins may facilitate more sensitive, accurate, or precise detection of the biomarkers of interest in the sample.

[0231] Abundant proteins in blood or blood derivatives (e.g., plasma or serum) include without limitation albumin, IgG, transferrin, fibrinogen, IgA, α₂-Macroglobulin, IgM, α₁-Antitrypsin, complement C3, haptoglobulin, apolipoprotein A1, apolipoprotein A3, apolipoprotein B, α₁-Acid Glycoprotein, ceruloplasmin, complement C4, C1q, IgD, prealbumin (transthyretin), and plasminogen. Such proteins can be depleted using commercially available columns and kits. Examples of such columns comprise the Multiple Affinity Removal System from Agilent Technologies (Santa Clara, Calif.). This system include various cartridges designed to deplete different protein profiles, including the following cartridges with performance characteristics according to the manufacturer: Human 14, which eliminates approximately 94% of total protein (albumin, IgG, antitrypsin, IgA, transferrin, haptoglobin, fibrinogen, alpha2-macroglobulin, alpha1-acid glycoprotein (orosomucoid), IgM, apolipoprotein AI, apolipoprotein AII, complement C3 and transthyretin); Human 7, which eliminates approximately 85-90% of total protein (albumin, IgG, IgA, transferrin, haptoglobin, antitrypsin, and fibrinogen); Human 6, which eliminates approximately 85-90% of total protein (albumin, IgG, IgA, transferrin, haptoglobin, and antitrypsin); Human Albumin/IgG, which eliminates approximately 69% of total protein (albumin and IgG); and Human Albumin, which eliminates approximately 50-55% of total protein (albumin). The ProteoPrep® 20 Plasma Immunodepletion Kit from Sigma-Aldrich is intended to specifically remove the 20 most abundant proteins from human plasma or serum, which is about remove 97-98% of the total protein mass in plasma or serum (Sigma-Aldrich, St. Louis, Mo.). According to the manufacturer, the ProteoPrep® 20 removes: albumin, IgG, transferrin, fibrinogen, IgA, α₂-Macroglobulin, IgM, α₁-Antitrypsin, complement C3, haptoglobulin, apolipoprotein A1, A3 and B; α₁-Acid Glycoprotein, ceruloplasmin, complement C4, C1q; IgD, prealbumin, and plasminogen. Sigma-Aldrich also manufactures ProteoPrep® columns to remove albumin (HSA) and immunoglobulins (IgG). The ProteomeLab IgY-12 High Capacity Proteome Partitioning kits from Beckman Coulter (Fullerton, Calif.) are specifically designed to remove twelve highly abundant proteins (Albumin, IgG, Transferrin, Fibrinogen, IgA, α2-macroglobulin, IgM, α1-Antitrypsin, Haptoglobin, Orosomucoid, Apolipoprotein A-I, Apolipoprotein A-II) from the human biological fluids such as serum and plasma. Generally, such systems rely on immunodepletion to remove the target proteins, e.g., using small ligands and/or full antibodies. The PureProteome™ Human Albumin/Immunoglobulin Depletion Kit from Millipore (EMD Millipore Corporation, Billerica, Mass., USA) is a magnetic bead based kit that enables high depletion efficiency (typically >99%) of Albumin and all Immunoglobulins (i.e., IgG, IgA, IgM, IgE and IgD) from human serum or plasma samples. The ProteoExtract® Albumin/IgG Removal Kit, also from Millipore, is designed to deplete >80% of albumin and IgG from body fluid samples. Other similar protein depletion products include without limitation the following: Aurum™ Affi-Gels Blue mini kit (Bio-Rad, Hercules, Calif., USA); Vivapure® anti-HSA/IgG kit (Sartorius Stedim Biotech, Goettingen, Germany), Qproteome albumin/IgG depletion kit (Qiagen, Hilden, Germany); Seppro® MIXED 12-LC20 column (GenWay Biotech, San Diego, Calif., USA); Abundant Serum Protein Depletion Kit (Norgen Biotek Corp., Ontario, Canada); GBC Human Albumin/IgG/Transferrin 3 in 1 Depletion Column/Kit (Good Biotech Corp., Taiwan). These systems and similar systems can be used to remove abundant proteins from a biological sample, thereby improving the ability to detect low abundance circulating biomarkers such as proteins and vesicles.

[0232] Thromboplastin is a plasma protein aiding blood coagulation through conversion of prothrombin to thrombin. Thrombin in turn acts as a serine protease that converts soluble fibrinogen into insoluble strands of fibrin, as well as catalyzing many other coagulation-related reactions. Thus, thromboplastin is a protein that can be used to facilitate precipitation of fibrinogen/fibrin (blood clotting factors) out of plasma. In addition to or as an alternative to immunoaffinity protein removal, a blood sample can be treated with thromboplastin to deplete fibrinogen/fibrin. Thromboplastin removal can be performed in addition to or as an alternative to immunoaffinity protein removal as described above using methods known in the art. Precipitation of other proteins and/or other sample particulate can also improve detection of circulating biomarkers such as vesicles in a sample. For example, ammonium sulfate treatment as known in the art can be used to precipitate immunoglobulins and other highly abundant proteins.

[0233] In an embodiment, the invention provides a method of detecting a presence or level of one or more circulating biomarker such as a microvesicle in a biological sample, comprising: (a) providing a biological sample comprising or suspected to comprise the one or more circulating biomarker; (b) selectively depleting one or more abundant protein from the biological sample provided in step (a); (c) performing affinity selection of the one or more circulating biomarker from the sample depleted in step (b), thereby detecting the presence or level of one or more circulating biomarker. The biological sample may comprise a bodily fluid, e.g., peripheral blood, sera, plasma, ascites, urine, cerebrospinal fluid (CSF), sputum, saliva, bone marrow, synovial fluid, aqueous humor, amniotic fluid, cerumen, breast milk, broncheoalveolar lavage fluid, semen, prostatic fluid, cowper's fluid or pre-ejaculatory fluid, female ejaculate, sweat, fecal matter, hair, tears, cyst fluid, pleural and peritoneal fluid, pericardial fluid, lymph, chyme, chyle, bile, interstitial fluid, menses, pus, sebum, vomit, vaginal secretions, mucosal secretion, stool water, pancreatic juice, lavage fluids from sinus cavities, bronchopulmonary aspirates, blastocyl cavity fluid, umbilical cord blood, or a derivative of any thereof. In some embodiments, the biological sample comprises peripheral blood, serum or plasma. Illustrative protocols and results from selectively depleting one or more abundant protein from blood plasma prior to vesicle detection can be found in Example 40 of International Patent Publication No. WO/2014/082083, filed Nov. 26, 2013, which patent publication is incorporated by reference herein in its entirety.

[0234] An abundant protein may comprise a protein in the sample that is present in the sample at a high enough concentration to potentially interfere with downstream processing or analysis. Typically, an abundant protein is not the target of any further analysis of the sample. The abundant protein may constitute at least 10⁻⁵, 10⁻⁴, 10⁻³, 0.01, 0.02, 0.03, 0.04, 0.05, 0.06, 0.07, 0.08, 0.09, 0.1, 0.2, 0.3, 0.4, 0.5, 0.6, 0.7, 0.8, 0.9, 1, 2, 3, 4, 5, 6, 7, 8, 9, 10, 11, 12, 13, 14, 15, 20, 25, 30, 35, 40, 45, 50, 55, 60, 65, 70, 75, 80, 85, 90, 95, 96, 97, 98 or at least 99% of the total protein mass in the sample. In some embodiments, the abundant protein is present at less than 10⁻⁵% of the total protein mass in the sample, e.g., in the case of a rare target of interest. As described herein, in the case of blood or a derivative thereof, the one or more abundant protein may comprise one or more of albumin, IgG, transferrin, fibrinogen, fibrin, IgA, α2-Marcroglobulin, IgM, α1-Antitrypsin, complement C3, haptoglobulin, apolipoprotein A1, A3 and B; α1-Acid Glycoprotein, ceruloplasmin, complement C4, C1q, IgD, prealbumin (transthyretin), plasminogen, a derivative of any thereof, and a combination thereof. The one or more abundant protein in blood or a blood derivative may also comprise one or more of Albumin, Immunoglobulins, Fibrinogen, Prealbumin, Alpha 1 antitrypsin, Alpha 1 acid glycoprotein, Alpha 1 fetoprotein, Haptoglobin, Alpha 2 macroglobulin, Ceruloplasmin, Transferrin, complement proteins C3 and C4, Beta 2 microglobulin, Beta lipoprotein, Gamma globulin proteins, C-reactive protein (CRP), Lipoproteins (chylomicrons, VLDL, LDL, HDL), other globulins (types alpha, beta and gamma), Prothrombin, Mannose-binding lectin (MBL), a derivative of any thereof, and a combination thereof.

[0235] In some embodiments, selectively depleting the one or more abundant protein comprises contacting the biological sample with thromboplastin to initiate precipitation of fibrin. The one or more abundant protein may also be depleted by immunoaffinity, precipitation, or a combination thereof. For example, the sample can be treated with thromboplastin to precipitate fibrin, and then the sample may be passed through a column to remove HSA, IgG, and other abundant proteins as desired.

[0236] “Selectively depleting” the one or more abundant protein comprises depleting the abundant protein from the sample at a higher percentage than depletion another entity in the sample, such as another protein or microvesicle, including a target of interest for downstream processing or analysis. Selectively depleting the one or more abundant protein may comprise depleting the abundant protein at a 1.1-fold, 1.2-fold, 1.3-fold, 1.4-fold, 1.5-fold, 1.6-fold, 1.7-fold, 1.8-fold, 1.9-fold, 2-fold, 3-fold, 4-fold, 5-fold, 6-fold, 7-fold, 8-fold, 9-fold, 10-fold, 11-fold, 12-fold, 13-fold, 14-fold, 15-fold, 16-fold, 17-fold, 18-fold, 19-fold, 20-fold, 25-fold, 30-fold, 40-fold, 50-fold, 60-fold, 70-fold, 80-fold, 90-fold, 100-fold, 200-fold, 300-fold, 400-fold, 500-fold, 600-fold, 700-fold, 800-fold, 900-fold, 1000-fold, 10⁴-fold, 10⁵-fold, 10⁶⁻fold, 10⁷-fold, 10⁸-fold, 10⁹-fold, 10¹⁰-fold, 10¹¹-fold, 10¹²-fold, 10¹³-fold, 10¹⁴-fold, 10¹⁵-fold, 10¹⁶-fold, 10¹⁷-fold, 10¹⁸-fold, 10¹⁹-fold, 10²⁰-fold, or higher rate than another entity in the sample, such as another protein or microvesicle, including a target of interest for downstream processing or analysis. In an embodiment, there is little to no observable depletion of the target of interest as compared to the depletion of the abundant protein. In some embodiments, selectively depleting the one or more abundant protein from the biological sample comprises depleting at least 25%, 30%, 35%, 40%, 45%, 50%, 55%, 60%, 65%, 70%, 75%, 80%, 85%, 90%, 91%, 92%, 93%, 94%, 95%, 96%, 97%, 98%, 99% or 100% of the one or more abundant protein.

[0237] Removal of highly abundant proteins and other non-desired entities can further be facilitated with a non-stringent size exclusion step. For example, the sample can be processed using a high molecular weight cutoff size exclusion step to preferentially enrich high molecular weight vesicles apart from lower molecular weight proteins and other entities. In some embodiments, a sample is processed with a column (e.g., a gel filtration column) or filter having a molecular weight cutoff (MWCO) of 500, 600, 700, 800, 900, 1000, 1500, 2000, 2500, 3000, 3500, 4000, 4500, 5000, 5500, 6000, 6500, 7000, 7500, 8000, 8500, 9000, 9500, 10000, or greater than 10000 kiloDaltons (kDa). In an embodiment, a 700 kDa filtration column is used. In such a step, the vesicles will be retained or flow more slowly than the column or filter than the lower molecular weight entities. Such columns and filters are known in the art.

[0238] Isolation or enrichment of a vesicle from a biological sample can also be enhanced by use of sonication (for example, by applying ultrasound), detergents, other membrane-activating agents, or any combination thereof. For example, ultrasonic energy can be applied to a potential tumor site, and without being bound by theory, release of vesicles from a tissue can be increased, allowing an enriched population of vesicles that can be analyzed or assessed from a biological sample using one or more methods disclosed herein.

[0239] With methods of detecting circulating biomarkers as described here, e.g., antibody affinity isolation, the consistency of the results can be optimized as desired using various concentration or isolation procedures. Such steps can include agitation such as shaking or vortexing, different isolation techniques such as polymer based isolation, e.g., with PEG, and concentration to different levels during filtration or other steps. It will be understood by those in the art that such treatments can be applied at various stages of testing the vesicle containing sample. In one embodiment, the sample itself, e.g., a bodily fluid such as plasma or serum, is vortexed. In some embodiments, the sample is vortexed after one or more sample treatment step, e.g., vesicle isolation, has occurred. Agitation can occur at some or all appropriate sample treatment steps as desired. Additives can be introduced at the various steps to improve the process, e.g., to control aggregation or degradation of the biomarkers of interest.

[0240] The results can also be optimized as desirable by treating the sample with various agents. Such agents include additives to control aggregation and/or additives to adjust pH or ionic strength. Additives that control aggregation include blocking agents such as bovine serum albumin (BSA), milk or StabilGuard® (a BSA-free blocking agent; Product code SG02, Surmodics, Eden Prairie, Minn.), chaotropic agents such as guanidium hydro chloride, and detergents or surfactants. Useful ionic detergents include sodium dodecyl sulfate (SDS, sodium lauryl sulfate (SLS)), sodium laureth sulfate (SLS, sodium lauryl ether sulfate (SLES)), ammonium lauryl sulfate (ALS), cetrimonium bromide, cetrimonium chloride, cetrimonium stearate, and the like. Useful non-ionic (zwitterionic) detergents include polyoxyethylene glycols, polysorbate 20 (also known as Tween 20), other polysorbates (e.g., 40, 60, 65, 80, etc), Triton-X (e.g., X100, X114), 3-[(3-cholamidopropyl)dimethylammonio]-1-propanesulfonate (CHAPS), CHAPSO, deoxycholic acid, sodium deoxycholate, NP-40, glycosides, octyl-thio-glucosides, maltosides, and the like. In some embodiments, Pluronic F-68, a surfactant shown to reduce platelet aggregation, is used to treat samples containing vesicles during isolation and/or detection. F68 can be used from a 0.1% to 10% concentration, e.g., a 1%, 2.5% or 5% concentration. The pH and/or ionic strength of the solution can be adjusted with various acids, bases, buffers or salts, including without limitation sodium chloride (NaCl), phosphate-buffered saline (PBS), tris-buffered saline (TBS), sodium phosphate, potassium chloride, potassium phosphate, sodium citrate and saline-sodium citrate (SSC) buffer. In some embodiments, NaCl is added at a concentration of 0.1% to 10%, e.g., 1%, 2.5% or 5% final concentration. In some embodiments, Tween 20 is added to 0.005 to 2% concentration, e.g., 0.05%, 0.25% or 0.5% final concentration. Blocking agents for use with the invention comprise inert proteins, e.g., milk proteins, non-fat dry milk protein, albumin, BSA, casein, or serum such as newborn calf serum (NBCS), goat serum, rabbit serum or salmon serum. The proteins can be added at a 0.1% to 10% concentration, e.g., 1%, 2%, 3%, 3.5%, 4%, 5%, 6%, 7%, 8%, 9% or 10% concentration. In some embodiments, BSA is added to 0.1% to 10% concentration, e.g., 1%, 2%, 3%, 3.5%, 4%, 5%, 6%, 7%, 8%, 9% or 10% concentration. In an embodiment, the sample is treated according to the methodology presented in U.S. patent application Ser. No. 11/632,946, filed Jul. 13, 2005, which application is incorporated herein by reference in its entirety. Commercially available blockers may be used, such as SuperBlock, StartingBlock, Protein-Free from Pierce (a division of Thermo Fisher Scientific, Rockford, Ill.). In some embodiments, SSC/detergent (e.g., 20×SSC with 0.5% Tween 20 or 0.1% Triton-X 100) is added to 0.1% to 10% concentration, e.g., at 1.0% or 5.0% concentration.

[0241] The methods of detecting vesicles and other circulating biomarkers can be optimized as desired with various combinations of protocols and treatments as described herein. A detection protocol can be optimized by various combinations of agitation, isolation methods, and additives. In some embodiments, the patient sample is vortexed before and after isolation steps, and the sample is treated with blocking agents including BSA and/or F68. Such treatments may reduce the formation of large aggregates or protein or other biological debris and thus provide a more consistent detection reading.

[0242] Filtration and Ultrafiltration

[0243] A vesicle can be isolated from a biological sample by filtering a biological sample from a subject through a filtration module and collecting from the filtration module a retentate comprising the vesicle, thereby isolating the vesicle from the biological sample. The method can comprise filtering a biological sample from a subject through a filtration module comprising a filter (also referred to herein as a selection membrane); and collecting from the filtration module a retentate comprising the vesicle, thereby isolating the vesicle from the biological sample. For example, in one embodiment, the filter retains molecules greater than about 100 or 150 kiloDaltons. In such cases, microvesicles are generally found within the retentate of the filtration process whereas smaller entities such as proteins, protein complexes, nucleic acids, etc, pass through into the filtrate.

[0244] Techniques and compositions useful for filtering a biological sample to isolate microvesicles or other biomarkers are disclosed of International Patent Application Nos. PCT/US2009/62880, filed Oct. 30, 2009; PCT/US2009/006095, filed Nov. 12, 2009; PCT/US2011/26750, filed Mar. 1, 2011; PCT/US2011/031479, filed Apr. 6, 2011; PCT/US11/48327, filed Aug. 18, 2011; PCT/US2008/71235, filed Jul. 25, 2008; PCT/US10/58461, filed Nov. 30, 2010; PCT/US2011/21160, filed Jan. 13, 2011; PCT/US2013/030302, filed Mar. 11, 2013; PCT/US12/25741, filed Feb. 17, 2012; PCT/2008/76109, filed Sep. 12, 2008; PCT/US12/42519, filed Jun. 14, 2012; PCT/US12/50030, filed Aug. 8, 2012; PCT/US12/49615, filed Aug. 3, 2012; PCT/US12/41387, filed Jun. 7, 2012; PCT/US2013/072019, filed Nov. 26, 2013; PCT/US2014/039858, filed May 28, 2013; PCT/IB2013/003092, filed Oct. 23, 2013; PCT/US13/76611, filed Dec. 19, 2013; PCT/US14/53306, filed Aug. 28, 2014; and PCT/US15/62184, filed Nov. 23, 2015; PCT/US2016/021632, filed Mar. 9, 2016; PCT/US2016/040157, filed Jun. 29, 2016; and PCT/US2016/044595, filed Jul. 28, 2016; each of which applications is incorporated herein by reference in its entirety.

[0245] Precipitation

[0246] Vesicles can be isolated using a polymeric precipitation method. The method can be in combination with or in place of the other isolation methods described herein. In one embodiment, the sample containing the vesicles is contacted with a formulation of polyethylene glycol (PEG). The polymeric formulation is incubated with the vesicle containing sample then precipitated by centrifugation. The PEG can bind to the vesicles and can be treated to specifically capture vesicles by addition of a capture moiety, e.g., a pegylated-binding protein such as an antibody. One of skill will appreciate that other polymers in addition to PEG can be used, e.g., PEG derivatives including methoxypolyethylene glycols, poly (ethylene oxide), and various polymers of formula HO—CH₂—(CH₂—O—CH₂-)n-CH₂—OH having different molecular weights. The efficiency of isolation may depend on various factors including the length of the polymer chains and concentration of polymer used. In preferred embodiments, PEG4000 or PEG 8000 may be used at a concentration of 1%, 2%, 3%, 4%, 5%, 6%, 7%, 8%, 9%, or 10%, e.g., 4% or 8%.

[0247] In some embodiments of the invention, the vesicles are concentrated from a sample using the polymer precipitation method and the isolated vesicles are further separated using another approach. The second step can be used to identify a subpopulation of vesicles, e.g., that display certain biomarkers. The second separation step can comprise size exclusion, a binding agent, an antibody capture step, microbeads, as described herein.

[0248] In an embodiment, vesicles are isolated according to the ExoQuick™ and ExoQuick-TC™ kits from System Biosciences, Mountain View, Calif. USA. These kits use a polymer-based precipitation method to pellet vesicles. Similarly, the vesicles can be isolated using the Total Exosome Isolation (from Serum) or Total Exosome Isolation (from Cell Culture Media) kits from Invitrogen/Life Technologies (Carlsbad, Calif. USA). The Total Exosome Isolation reagent forces less-soluble components such as vesicles out of solution, allowing them to be collected by a short, low-speed centrifugation. The reagent is added to the biological sample, and the solution is incubated overnight at 2° C. to 8° C. The precipitated vesicles are recovered by standard centrifugation.

[0249] Binding Agents

[0250] Binding agents (also referred to as binding reagents) include agents that are capable of binding a target biomarker. A binding agent can be specific for the target biomarker, meaning the agent is capable of binding a target biomarker. The target can be any useful biomarker disclosed herein, such as a biomarker on the vesicle surface. In some embodiments, the target is a single molecule, such as a single protein, so that the binding agent is specific to the single protein. In other embodiments, the target can be a group of molecules, such as a family or proteins having a similar epitope or moiety, so that the binding agent is specific to the family or group of proteins. The group of molecules can also be a class of molecules, such as protein, DNA or RNA. The binding agent can be a capture agent used to capture a vesicle by binding a component or biomarker of a vesicle. In some embodiments, a capture agent comprises an antibody or fragment thereof, or an aptamer, that binds to an antigen on a vesicle. The capture agent can be optionally coupled to a substrate and used to isolate a vesicle, as further described herein.

[0251] A binding agent is an agent that binds to a circulating biomarker, such as a vesicle or a component of a vesicle. The binding agent can be used as a capture agent and/or a detection agent. A capture agent can bind and capture a circulating biomarker, such as by binding a component or biomarker of a vesicle. For example, the capture agent can be a capture antibody or capture antigen that binds to an antigen on a vesicle. A detection agent can bind to a circulating biomarker thereby facilitating detection of the biomarker. For example, a capture agent comprising an antibody or aptamer that is sequestered to a substrate can be used to capture a vesicle in a sample, and a detection agent comprising an antibody or aptamer that carries a label can be used to detect the captured vesicle via detection of the detection agent's label. In some embodiments, a vesicle is assessed using capture and detection agents that recognize the same vesicle biomarkers. For example, a vesicle population can be captured using a tetraspanin such as by using an anti-CD9 antibody bound to a substrate, and the captured vesicles can be detected using a fluorescently labeled anti-CD9 antibody to label the captured vesicles. In other embodiments, a vesicle is assessed using capture and detection agents that recognize different vesicle biomarkers. For example, a vesicle population can be captured using a cell-specific marker such as by using an anti-PCSA antibody bound to a substrate, and the captured vesicles can be detected using a fluorescently labeled anti-CD9 antibody to label the captured vesicles. Similarly, the vesicle population can be captured using a general vesicle marker such as by using an anti-CD9 antibody bound to a substrate, and the captured vesicles can be detected using a fluorescently labeled antibody to a cell-specific or disease specific marker to label the captured vesicles.

[0252] The biomarkers recognized by the binding agent are sometimes referred to herein as an antigen. Unless otherwise specified, antigen as used herein is meant to encompass any entity that is capable of being bound by a binding agent, regardless of the type of binding agent or the immunogenicity of the biomarker. The antigen further encompasses a functional fragment thereof. For example, an antigen can encompass a protein biomarker capable of being bound by a binding agent, including a fragment of the protein that is capable of being bound by a binding agent.

[0253] In one embodiment, a vesicle is captured using a capture agent that binds to a biomarker on a vesicle. The capture agent can be coupled to a substrate and used to isolate a vesicle, as further described herein. In one embodiment, a capture agent is used for affinity capture or isolation of a vesicle present in a substance or sample.

[0254] A binding agent can be used after a vesicle is concentrated or isolated from a biological sample. For example, a vesicle can first be isolated from a biological sample before a vesicle with a specific biosignature is isolated or detected. The vesicle with a specific biosignature can be isolated or detected using a binding agent for the biomarker. A vesicle with the specific biomarker can be isolated or detected from a heterogeneous population of vesicles. Alternatively, a binding agent may be used on a biological sample comprising vesicles without a prior isolation or concentration step. For example, a binding agent is used to isolate or detect a vesicle with a specific biosignature directly from a biological sample.

[0255] A binding agent can be a nucleic acid, protein, or other molecule that can bind to a component of a vesicle. The binding agent can comprise DNA, RNA, monoclonal antibodies, polyclonal antibodies, Fabs, Fab′, single chain antibodies, synthetic antibodies, aptamers (DNA/RNA), peptoids, zDNA, peptide nucleic acids (PNAs), locked nucleic acids (LNAs), unlocked nucleic acid (UNA), lectins, synthetic or naturally occurring chemical compounds (including but not limited to drugs, labeling reagents), dendrimers, or a combination thereof. For example, the binding agent can be a capture antibody. In embodiments of the invention, the binding agent comprises a membrane protein labeling agent. See, e.g., the membrane protein labeling agents disclosed in Alroy et al., US. Patent Publication US 2005/0158708. In an embodiment, vesicles are isolated or captured as described herein, and one or more membrane protein labeling agent is used to detect the vesicles.

[0256] In some instances, a single binding agent can be employed to isolate or detect a vesicle. In other instances, a combination of different binding agents may be employed to isolate or detect a vesicle. For example, at least 2, 3, 4, 5, 6, 7, 8, 9, 10, 11, 12, 13, 14, 15, 16, 17, 18, 19, 20, 25, 50, 75 or 100 different binding agents may be used to isolate or detect a vesicle from a biological sample. Furthermore, the one or more different binding agents for a vesicle can form a biosignature of a vesicle, as further described below.

[0257] Different binding agents can also be used for multiplexing. For example, isolation or detection of more than one population of vesicles can be performed by isolating or detecting each vesicle population with a different binding agent. Different binding agents can be bound to different particles, wherein the different particles are labeled. In another embodiment, an array comprising different binding agents can be used for multiplex analysis, wherein the different binding agents are differentially labeled or can be ascertained based on the location of the binding agent on the array. Multiplexing can be accomplished up to the resolution capability of the labels or detection method, such as described below. The binding agents can be used to detect the vesicles, such as for detecting cell-of-origin specific vesicles. A binding agent or multiple binding agents can themselves form a binding agent profile that provides a biosignature for a vesicle. One or more binding agents can be selected from FIG. 2 of International Patent Publication No. WO/2011/127219, entitled “Circulating Biomarkers for Disease” and filed Apr. 6, 2011, which application is incorporated by reference in its entirety herein. For example, if a vesicle population is detected or isolated using two, three, four or more binding agents in a differential detection or isolation of a vesicle from a heterogeneous population of vesicles, the particular binding agent profile for the vesicle population provides a biosignature for the particular vesicle population. The vesicle can be detected using any number of binding agents in a multiplex fashion. Thus, the binding agent can also be used to form a biosignature for a vesicle. The biosignature can be used to characterize a phenotype.

[0258] The binding agent can be a lectin. Lectins are proteins that bind selectively to polysaccharides and glycoproteins and are widely distributed in plants and animals. For example, lectins such as those derived from Galanthus nivalis in the form of Galanthus nivalis agglutinin (“GNA”), Narcissus pseudonarcissus in the form of Narcissus pseudonarcissus agglutinin (“NPA”) and the blue green algae Nostoc ellipsosporum called “cyanovirin” (Boyd et al. Antimicrob Agents Chemother 41(7): 1521 1530, 1997; Hammar et al. Ann N Y Acad Sci 724: 166 169, 1994; Kaku et al. Arch Biochem Biophys 279(2): 298 304, 1990) can be used to isolate a vesicle. These lectins can bind to glycoproteins having a high mannose content (Chervenak et al. Biochemistry 34(16): 5685 5695, 1995). High mannose glycoprotein refers to glycoproteins having mannose-mannose linkages in the form of α-1→3 or α-1→6 mannose-mannose linkages.

[0259] The binding agent can be an agent that binds one or more lectins. Lectin capture can be applied to the isolation of the biomarker cathepsin D since it is a glycosylated protein capable of binding the lectins Galanthus nivalis agglutinin (GNA) and concanavalin A (ConA).

[0260] Methods and devices for using lectins to capture vesicles are described in International Patent Publications WO/2011/066589, entitled “METHODS AND SYSTEMS FOR ISOLATING, STORING, AND ANALYZING VESICLES” and filed Nov. 30, 2010; WO/2010/065765, entitled “AFFINITY CAPTURE OF CIRCULATING BIOMARKERS” and filed Dec. 3, 2009; WO/2010/141862, entitled “METHODS AND MATERIALS FOR ISOLATING EXOSOMES” and filed Jun. 4, 2010; and WO/2007/103572, entitled “EXTRACORPOREAL REMOVAL OF MICROVESICULAR PARTICLES” and filed Mar. 9, 2007, each of which applications is incorporated by reference herein in its entirety.

[0261] The binding agent can be an antibody. For example, a vesicle may be isolated using one or more antibodies specific for one or more antigens present on the vesicle. For example, a vesicle can have CD63 on its surface, and an antibody, or capture antibody, for CD63 can be used to isolate the vesicle. Alternatively, a vesicle derived from a tumor cell can express EpCam, the vesicle can be isolated using an antibody for EpCam and CD63. Other antibodies for isolating vesicles can include an antibody, or capture antibody, to CD9, PSCA, TNFR, CD63, B7H3, MFG-E8, EpCam, Rab, CD81, STEAP, PCSA, PSMA, or 5T4. Other antibodies for isolating vesicles can include an antibody, or capture antibody, to DR3, STEAP, epha2, TMEM211, MFG-E8, Tissue Factor (TF), unc93A, A33, CD24, NGAL, EpCam, MUC17, TROP2, or TETS.

[0262] In some embodiments, the capture agent is an antibody to CD9, CD63, CD81, PSMA, PCSA, B7H3, EpCam, PSCA, ICAM, STEAP, or EGFR. The capture agent can also be used to identify a biomarker of a vesicle. For example, a capture agent such as an antibody to CD9 would identify CD9 as a biomarker of the vesicle. In some embodiments, a plurality of capture agents can be used, such as in multiplex analysis. The plurality of captures agents can comprise binding agents to one or more of: CD9, CD63, CD81, PSMA, PCSA, B7H3, EpCam, PSCA, ICAM, STEAP, and EGFR. In some embodiments, the plurality of capture agents comprise binding agents to CD9, CD63, CD81, PSMA, PCSA, B7H3, MFG-E8, and/or EpCam. In yet other embodiments, the plurality of capture agents comprises binding agents to CD9, CD63, CD81, PSMA, PCSA, B7H3, EpCam, PSCA, ICAM, STEAP, and/or EGFR. The plurality of capture agents comprises binding agents to TMEM211, MFG-E8, Tissue Factor (TF), and/or CD24.

[0263] The antibodies referenced herein can be immunoglobulin molecules or immunologically active portions of immunoglobulin molecules, i.e., molecules that contain an antigen binding site that specifically binds an antigen and synthetic antibodies. The immunoglobulin molecules can be of any class (e.g., IgG, IgE, IgM, IgD or IgA) or subclass of immunoglobulin molecule. Antibodies include, but are not limited to, polyclonal, monoclonal, bispecific, synthetic, humanized and chimeric antibodies, single chain antibodies, Fab fragments and F(ab′)₂ fragments, Fv or Fv′ portions, fragments produced by a Fab expression library, anti-idiotypic (anti-Id) antibodies, or epitope-binding fragments of any of the above. An antibody, or generally any molecule, “binds specifically” to an antigen (or other molecule) if the antibody binds preferentially to the antigen, and, e.g., has less than about 30%, 20%, 10%, 5% or 1% cross-reactivity with another molecule.

[0264] The binding agent can also be a polypeptide or peptide. Polypeptide is used in its broadest sense and may include a sequence of subunit amino acids, amino acid analogs, or peptidomimetics. The subunits may be linked by peptide bonds. The polypeptides may be naturally occurring, processed forms of naturally occurring polypeptides (such as by enzymatic digestion), chemically synthesized or recombinantly expressed. The polypeptides for use in the methods of the present invention may be chemically synthesized using standard techniques. The polypeptides may comprise D-amino acids (which are resistant to L-amino acid-specific proteases), a combination of D- and L-amino acids, β amino acids, or various other designer or non-naturally occurring amino acids (e.g., β-methyl amino acids, Cα-methyl amino acids, and Nα-methyl amino acids, etc.) to convey special properties. Synthetic amino acids may include ornithine for lysine, and norleucine for leucine or isoleucine. In addition, the polypeptides can have peptidomimetic bonds, such as ester bonds, to prepare polypeptides with novel properties. For example, a polypeptide may be generated that incorporates a reduced peptide bond, i.e., R₁—CH₂—NH—R₂, where R₁ and R₂ are amino acid residues or sequences. A reduced peptide bond may be introduced as a dipeptide subunit. Such a polypeptide would be resistant to protease activity, and would possess an extended half-live in vivo. Polypeptides can also include peptoids (N-substituted glycines), in which the side chains are appended to nitrogen atoms along the molecule's backbone, rather than to the α-carbons, as in amino acids. Polypeptides and peptides are intended to be used interchangeably throughout this application, i.e. where the term peptide is used, it may also include polypeptides and where the term polypeptides is used, it may also include peptides. The term “protein” is also intended to be used interchangeably throughout this application with the terms “polypeptides” and “peptides” unless otherwise specified.

[0265] A vesicle may be isolated, captured or detected using a binding agent. The binding agent can be an agent that binds a vesicle “housekeeping protein,” or general vesicle biomarker. The biomarker can be CD63, CD9, CD81, CD82, CD37, CD53, Rab-5b, Annexin V, MFG-E8 or other commonly observed vesicle markers include those listed in Table 3. Furthermore, any of the markers disclosed herein or in Table 3 can be selected in identifying a candidate biosignature for a disease or condition, where the one or more selected biomarkers have a direct or indirect role or function in mechanisms involved in the disease or condition.

[0266] The binding agent can also be an agent that binds to a vesicle derived from a specific cell type, such as a tumor cell (e.g. binding agent for Tissue factor, EpCam, B7H3, RAGE or CD24) or a specific cell-of-origin. The binding agent used to isolate or detect a vesicle can be a binding agent for an antigen selected from FIG. 1 of International Patent Publication No. WO/2011/127219, entitled “Circulating Biomarkers for Disease” and filed Apr. 6, 2011, which application is incorporated by reference in its entirety herein. The binding agent for a vesicle can also be selected from those listed in FIG. 2 of International Patent Publication No. WO/2011/127219. The binding agent can be for an antigen such as a tetraspanin, MFG-E8, Annexin V, 5T4, B7H3, caveolin, CD63, CD9, E-Cadherin, Tissue factor, MFG-E8, TMEM211, CD24, PSCA, PCSA, PSMA, Rab-5B, STEAP, TNFR1, CD81, EpCam, CD59, CD81, ICAM, EGFR, or CD66. A binding agent for a platelet can be a glycoprotein such as GpIa-IIa, GpIIb-IIIa, GpIIIb, GpIb, or GpIX. A binding agent can be for an antigen comprising one or more of CD9, Erb2, Erb4, CD81, Erb3, MUC16, CD63, DLL4, HLA-Drpe, B7H3, IFNAR, 5T4, PCSA, MICB, PSMA, MFG-E8, Muc1, PSA, Muc2, Unc93a, VEGFR2, EpCAM, VEGF A, TMPRSS2, RAGE, PSCA, CD40, Muc17, IL-17-RA, and CD80. For example, the binding agent can be one or more of CD9, CD63, CD81, B7H3, PCSA, MFG-E8, MUC2, EpCam, RAGE and Muc17. One or more binding agents, such as one or more binding agents for two or more of the antigens, can be used for isolating or detecting a vesicle. The binding agent used can be selected based on the desire of isolating or detecting a vesicle derived from a particular cell type or cell-of-origin specific vesicle. The binding agent can be to one or more vesicle marker in Table 4 of International Patent Application PCT/US2016/040157, filed Jun. 29, 2016, and published as WO2017004243 on Jan. 5, 2017

[0267] A binding agent can also be linked directly or indirectly to a solid surface or substrate. A solid surface or substrate can be any physically separable solid to which a binding agent can be directly or indirectly attached including, but not limited to, surfaces provided by microarrays and wells, particles such as beads, columns, optical fibers, wipes, glass and modified or functionalized glass, quartz, mica, diazotized membranes (paper or nylon), polyformaldehyde, cellulose, cellulose acetate, paper, ceramics, metals, metalloids, semiconductive materials, quantum dots, coated beads or particles, other chromatographic materials, magnetic particles; plastics (including acrylics, polystyrene, copolymers of styrene or other materials, polypropylene, polyethylene, polybutylene, polyurethanes, polytetrafluoroethylene (PTFE, Teflon®), etc.), polysaccharides, nylon or nitrocellulose, resins, silica or silica-based materials including silicon and modified silicon, carbon, metals, inorganic glasses, plastics, ceramics, conducting polymers (including polymers such as polypyrrole and polyindole); micro or nanostructured surfaces such as nucleic acid tiling arrays, nanotube, nanowire, or nanoparticulate decorated surfaces; or porous surfaces or gels such as methacrylates, acrylamides, sugar polymers, cellulose, silicates, or other fibrous or stranded polymers. In addition, as is known the art, the substrate may be coated using passive or chemically-derivatized coatings with any number of materials, including polymers, such as dextrans, acrylamides, gelatins or agarose. Such coatings can facilitate the use of the array with a biological sample.

[0268] For example, an antibody used to isolate a vesicle can be bound to a solid substrate such as a well, such as commercially available plates (e.g. from Nunc, Milan Italy). Each well can be coated with the antibody. In some embodiments, the antibody used to isolate a vesicle is bound to a solid substrate such as an array. The array can have a predetermined spatial arrangement of molecule interactions, binding islands, biomolecules, zones, domains or spatial arrangements of binding islands or binding agents deposited within discrete boundaries. Further, the term array may be used herein to refer to multiple arrays arranged on a surface, such as would be the case where a surface bore multiple copies of an array. Such surfaces bearing multiple arrays may also be referred to as multiple arrays or repeating arrays.

[0269] Arrays typically contain addressable moieties that can detect the presence of an entity, e.g., a vesicle in the sample via a binding event. An array may be referred to as a microarray. Arrays or microarrays include without limitation DNA microarrays, such as cDNA microarrays, oligonucleotide microarrays and SNP microarrays, microRNA arrays, protein microarrays, antibody microarrays, tissue microarrays, cellular microarrays (also called transfection microarrays), chemical compound microarrays, and carbohydrate arrays (glycoarrays). DNA arrays typically comprise addressable nucleotide sequences that can bind to sequences present in a sample. MicroRNA arrays, e.g., the MMChips array from the University of Louisville or commercial systems from Agilent, can be used to detect microRNAs. Protein microarrays can be used to identify protein-protein interactions, including without limitation identifying substrates of protein kinases, transcription factor protein-activation, or to identify the targets of biologically active small molecules. Protein arrays may comprise an array of different protein molecules, commonly antibodies, or nucleotide sequences that bind to proteins of interest. In a non-limiting example, a protein array can be used to detect vesicles having certain proteins on their surface. Antibody arrays comprise antibodies spotted onto the protein chip that are used as capture molecules to detect proteins or other biological materials from a sample, e.g., from cell or tissue lysate solutions. For example, antibody arrays can be used to detect vesicle-associated biomarkers from bodily fluids, e.g., serum or urine. Tissue microarrays comprise separate tissue cores assembled in array fashion to allow multiplex histological analysis. Cellular microarrays, also called transfection microarrays, comprise various capture agents, such as antibodies, proteins, or lipids, which can interact with cells to facilitate their capture on addressable locations. Cellular arrays can also be used to capture vesicles due to the similarity between a vesicle and cellular membrane. Chemical compound microarrays comprise arrays of chemical compounds and can be used to detect protein or other biological materials that bind the compounds. Carbohydrate arrays (glycoarrays) comprise arrays of carbohydrates and can detect, e.g., protein that bind sugar moieties. One of skill will appreciate that similar technologies or improvements can be used according to the methods of the invention.

[0270] A binding agent can also be bound to particles such as beads or microspheres. For example, an antibody specific for a component of a vesicle can be bound to a particle, and the antibody-bound particle is used to isolate a vesicle from a biological sample. In some embodiments, the microspheres may be magnetic or fluorescently labeled. In addition, a binding agent for isolating vesicles can be a solid substrate itself. For example, latex beads, such as aldehyde/sulfate beads (Interfacial Dynamics, Portland, Oreg.) can be used.

[0271] A binding agent bound to a magnetic bead can also be used to isolate a vesicle. For example, a biological sample such as serum from a patient can be collected for colon cancer screening. The sample can be incubated with anti-CCSA-3 (Colon Cancer-Specific Antigen) coupled to magnetic microbeads. A low-density microcolumn can be placed in the magnetic field of a MACS Separator and the column is then washed with a buffer solution such as Tris-buffered saline. The magnetic immune complexes can then be applied to the column and unbound, non-specific material can be discarded. The CCSA-3 selected vesicle can be recovered by removing the column from the separator and placing it on a collection tube. A buffer can be added to the column and the magnetically labeled vesicle can be released by applying the plunger supplied with the column. The isolated vesicle can be diluted in IgG elution buffer and the complex can then be centrifuged to separate the microbeads from the vesicle. The pelleted isolated cell-of-origin specific vesicle can be resuspended in buffer such as phosphate-buffered saline and quantitated. Alternatively, due to the strong adhesion force between the antibody captured cell-of-origin specific vesicle and the magnetic microbeads, a proteolytic enzyme such as trypsin can be used for the release of captured vesicles without the need for centrifugation. The proteolytic enzyme can be incubated with the antibody captured cell-of-origin specific vesicles for at least a time sufficient to release the vesicles.

[0272] A binding agent, such as an antibody, for isolating vesicles is preferably contacted with the biological sample comprising the vesicles of interest for at least a time sufficient for the binding agent to bind to a component of the vesicle. For example, an antibody may be contacted with a biological sample for various intervals ranging from seconds days, including but not limited to, about 10 minutes, 30 minutes, 1 hour, 3 hours, 5 hours, 7 hours, 10 hours, 15 hours, 1 day, 3 days, 7 days or 10 days.

[0273] A binding agent, such as an antibody specific to an antigen listed in FIG. 1 of International Patent Publication No. WO/2011/127219, entitled “Circulating Biomarkers for Disease” and filed Apr. 6, 2011, which application is incorporated by reference in its entirety herein, or a binding agent listed in FIG. 2 of International Patent Publication No. WO/2011/127219, can be labeled to facilitate detection. Appropriate labels include without limitation a magnetic label, a fluorescent moiety, an enzyme, a chemiluminescent probe, a metal particle, a non-metal colloidal particle, a polymeric dye particle, a pigment molecule, a pigment particle, an electrochemically active species, semiconductor nanocrystal or other nanoparticles including quantum dots or gold particles, fluorophores, quantum dots, or radioactive labels. Various protein, radioactive, fluorescent, enzymatic, and other labels are described further above.

[0274] A binding agent can be directly or indirectly labeled, e.g., the label is attached to the antibody through biotin-streptavidin. Alternatively, an antibody is not labeled, but is later contacted with a second antibody that is labeled after the first antibody is bound to an antigen of interest.

[0275] Depending on the method of isolation or detection used, the binding agent may be linked to a solid surface or substrate, such as arrays, particles, wells and other substrates described above. Methods for direct chemical coupling of antibodies, to the cell surface are known in the art, and may include, for example, coupling using glutaraldehyde or maleimide activated antibodies. Methods for chemical coupling using multiple step procedures include biotinylation, coupling of trinitrophenol (TNP) or digoxigenin using for example succinimide esters of these compounds. Biotinylation can be accomplished by, for example, the use of D-biotinyl-N-hydroxysuccinimide. Succinimide groups react effectively with amino groups at pH values above 7, and preferentially between about pH 8.0 and about pH 8.5. Biotinylation can be accomplished by, for example, treating the cells with dithiothreitol followed by the addition of biotin maleimide.

[0276] Particle-Based Assays

[0277] As an alternative to planar arrays, assays using particles or microspheres, such as bead based assays, are capable of use with a binding agent. For example, antibodies or aptamers are easily conjugated with commercially available beads. See, e.g., Fan et al., Illumina universal bead arrays. Methods Enzymol. 2006 410:57-73; Srinivas et al. Anal. Chem. 2011 Oct. 21, Aptamer functionalized Microgel Particles for Protein Detection; See also, review article on aptamers as therapeutic and diagnostic agents, Brody and Gold, Rev. Mol. Biotech. 2000, 74:5-13.

[0278] Multiparametric assays or other high throughput detection assays using bead coatings with cognate ligands and reporter molecules with specific activities consistent with high sensitivity automation can be used. In a bead based assay system, a binding agent for a biomarker or vesicle, such as a capture agent (e.g. capture antibody), can be immobilized on an addressable microsphere. Each binding agent for each individual binding assay can be coupled to a distinct type of microsphere (i.e., microbead) and the assay reaction takes place on the surface of the microsphere, such as depicted in FIG. 2B. A binding agent for a vesicle can be a capture antibody or aptamer coupled to a bead. Dyed microspheres with discrete fluorescence intensities are loaded separately with their appropriate binding agent or capture probes. The different bead sets carrying different binding agents can be pooled as desired to generate custom bead arrays. Bead arrays are then incubated with the sample in a single reaction vessel to perform the assay.

[0279] Various particle/bead substrates and systems useful for the methods of the invention are described further above.

[0280] Flow Cytometry

[0281] In various embodiments of the invention, flow cytometry, which is described in further detail above, is used to assess a microvesicle population in a biological sample. If desired, the microvesicle population can be sorted from other particles (e.g., cell debris, protein aggregates, etc) in a sample by labeling the vesicles using one or more general vesicle marker. The general vesicle marker can be a marker in Table 3. Commonly used vesicle markers include tetraspanins such as CD9, CD63 and/or CD81. Vesicles comprising one or more tetraspanin are sometimes referred to as “Tet+” herein to indicate that the vesicles are tetraspanin-positive. The sorted microvesicles can be further assessed using methodology described herein. E.g., surface antigens on the sorted microvesicles can be detected using flow or other methods. In some embodiments, payload within the sorted microvesicles is assessed. As an illustrative example, a population of microvesicles is contacted with a labeled binding agent to a surface antigen of interest, the contacted microvesicles are sorted using flow cytometry, and payload with the microvesicles is assessed. The payload may be polypeptides, nucleic acids (e.g., mRNA or microRNA) or other biological entities as desired. Such assessment is used to characterize a phenotype as described herein, e.g., to diagnose, prognose or theranose a cancer.

[0282] In an embodiment, flow sorting is used to distinguish microvesicle populations from other biological complexes. In a non-limiting example, Ago2+/Tet+ and Ago2+/Tet− particles are detected using flow methodology to separate Ago2+vesicles from vesicle-free Ago2+ complexes, respectively.

[0283] Multiplexing

[0284] Multiplex experiments comprise experiments that can simultaneously measure multiple analytes in a single assay. Vesicles and associated biomarkers can be assessed in a multiplex fashion. Different binding agents can be used for multiplexing different circulating biomarkers, e.g., microRNA, protein, or vesicle populations. Different biomarkers, e.g., different vesicle populations, can be isolated or detected using different binding agents. Each population in a biological sample can be labeled with a different signaling label, such as a fluorophore, quantum dot, or radioactive label, such as described above. The label can be directly conjugated to a binding agent or indirectly used to detect a binding agent that binds a vesicle. The number of populations detected in a multiplexing assay is dependent on the resolution capability of the labels and the summation of signals, as more than two differentially labeled vesicle populations that bind two or more affinity elements can produce summed signals.

[0285] Multiplexing of at least 2, 3, 4, 5, 6, 7, 8, 9, 10, 11, 12, 13, 14, 15, 16, 17, 18, 19, 20, 25, 50, 75 or 100 different circulating biomarkers may be performed. For example, one population of vesicles specific to a cell-of-origin can be assayed along with a second population of vesicles specific to a different cell-of-origin, where each population is labeled with a different label. Alternatively, a population of vesicles with a particular biomarker or biosignature can be assayed along with a second population of vesicles with a different biomarker or biosignature. In some cases, hundreds or thousands of vesicles are assessed in a single assay.

[0286] In one embodiment, multiplex analysis is performed by applying a plurality of vesicles comprising more than one population of vesicles to a plurality of substrates, such as beads. Each bead is coupled to one or more capture agents. The plurality of beads is divided into subsets, where beads with the same capture agent or combination of capture agents form a subset of beads, such that each subset of beads has a different capture agent or combination of capture agents than another subset of beads. The beads can then be used to capture vesicles that comprise a component that binds to the capture agent. The different subsets can be used to capture different populations of vesicles. The captured vesicles can then be analyzed by detecting one or more biomarkers.

[0287] Flow cytometry can be used in combination with a particle-based or bead based assay. Multiparametric immunoassays or other high throughput detection assays using bead coatings with cognate ligands and reporter molecules with specific activities consistent with high sensitivity automation can be used. For example, beads in each subset can be differentially labeled from another subset. In a particle based assay system, a binding agent or capture agent for a vesicle, such as a capture antibody, can be immobilized on addressable beads or microspheres. Each binding agent for each individual binding assay (such as an immunoassay when the binding agent is an antibody) can be coupled to a distinct type of microsphere (i.e., microbead) and the binding assay reaction takes place on the surface of the microspheres. Microspheres can be distinguished by different labels, for example, a microsphere with a specific capture agent would have a different signaling label as compared to another microsphere with a different capture agent. For example, microspheres can be dyed with discrete fluorescence intensities such that the fluorescence intensity of a microsphere with a specific binding agent is different than that of another microsphere with a different binding agent. Biomarkers bound by different capture agents can be differentially detected using different labels.

[0288] A microsphere can be labeled or dyed with at least 2 different labels or dyes. In some embodiments, the microsphere is labeled with at least 3, 4, 5, 6, 7, 8, 9, or 10 different labels. Different microspheres in a plurality of microspheres can have more than one label or dye, wherein various subsets of the microspheres have various ratios and combinations of the labels or dyes permitting detection of different microspheres with different binding agents. For example, the various ratios and combinations of labels and dyes can permit different fluorescent intensities. Alternatively, the various ratios and combinations maybe used to generate different detection patters to identify the binding agent. The microspheres can be labeled or dyed externally or may have intrinsic fluorescence or signaling labels.

[0289] Beads can be loaded separately with their appropriate binding agents and thus, different vesicle populations can be isolated based on the different binding agents on the differentially labeled microspheres to which the different binding agents are coupled.

[0290] In another embodiment, multiplex analysis can be performed using a planar substrate, wherein the substrate comprises a plurality of capture agents. The plurality of capture agents can capture one or more populations of vesicles, and one or more biomarkers of the captured vesicles detected. The planar substrate can be a microarray or other substrate as further described herein.

[0291] Binding Agents

[0292] A vesicle may be isolated or detected using a binding agent for a novel component of a vesicle, such as an antibody for a novel antigen specific to a vesicle of interest. Novel antigens that are specific to a vesicle of interest may be isolated or identified using different test compounds of known composition bound to a substrate, such as an array or a plurality of particles, which can allow a large amount of chemical/structural space to be adequately sampled using only a small fraction of the space. The novel antigen identified can also serve as a biomarker for the vesicle. For example, a novel antigen identified for a cell-of-origin specific vesicle can be a useful biomarker.

[0293] The term “agent” or “reagent” as used in respect to contacting a sample can mean any entity designed to bind, hybridize, associate with or otherwise detect or facilitate detection of a target molecule, including target polypeptides, peptides, nucleic acid molecules, leptins, lipids, or any other biological entity that can be detected as described herein or as known in the art. Examples of such agents/reagents are well known in the art, and include but are not limited to universal or specific nucleic acid primers, nucleic acid probes, antibodies, aptamers, peptoid, peptide nucleic acid, locked nucleic acid, lectin, dendrimer, chemical compound, or other entities described herein or known in the art.

[0294] A binding agent can be identified by screening either a homogeneous or heterogeneous vesicle population against test compounds. Since the composition of each test compound on the substrate surface is known, this constitutes a screen for affinity elements. For example, a test compound array comprises test compounds at specific locations on the substrate addressable locations, and can be used to identify one or more binding agents for a vesicle. The test compounds can all be unrelated or related based on minor variations of a core sequence or structure. The different test compounds may include variants of a given test compound (such as polypeptide isoforms), test compounds that are structurally or compositionally unrelated, or a combination thereof.

[0295] A test compound can be a peptoid, polysaccharide, organic compound, inorganic compound, polymer, lipids, nucleic acid, polypeptide, antibody, protein, polysaccharide, or other compound. The test compound can be natural or synthetic. The test compound can comprise or consist of linear or branched heteropolymeric compounds based on any of a number of linkages or combinations of linkages (e.g., amide, ester, ether, thiol, radical additions, metal coordination, etc.), dendritic structures, circular structures, cavity structures or other structures with multiple nearby sites of attachment that serve as scaffolds upon which specific additions are made. These test compound can be spotted on a substrate or synthesized in situ, using standard methods in the art. In addition, the test compound can be spotted or synthesized in situ in combinations in order to detect useful interactions, such as cooperative binding.

[0296] The test compound can be a polypeptide with known amino acid sequence, thus, detection of a test compound binding with a vesicle can lead to identification of a polypeptide of known amino sequence that can be used as a binding agent. For example, a homogenous population of vesicles can be applied to a spotted array on a slide containing between a few and 1,000,000 test polypeptides having a length of variable amino acids. The polypeptides can be attached to the surface through the C-terminus. The sequence of the polypeptides can be generated randomly from 19 amino acids, excluding cysteine. The binding reaction can include a non-specific competitor, such as excess bacterial proteins labeled with another dye such that the specificity ratio for each polypeptide binding target can be determined. The polypeptides with the highest specificity and binding can be selected. The identity of the polypeptide on each spot is known, and thus can be readily identified. Once the novel antigens specific to the homogeneous vesicle population, such as a cell-of-origin specific vesicle is identified, such cell-of-origin specific vesicles may subsequently be isolated using such antigens in methods described hereafter.

[0297] An array can also be used for identifying an antibody as a binding agent for a vesicle. Test antibodies can be attached to an array and screened against a heterogeneous population of vesicles to identify antibodies that can be used to isolate or identify a vesicle. A homogeneous population of vesicles such as cell-of-origin specific vesicles can also be screened with an antibody array. Other than identifying antibodies to isolate or detect a homogeneous population of vesicles, one or more protein biomarkers specific to the homogenous population can be identified. Commercially available platforms with test antibodies pre-selected or custom selection of test antibodies attached to the array can be used. For example, an antibody array from Full Moon Biosystems can be screened using prostate cancer cell derived vesicles identifying antibodies to Bcl-XL, ERCC1, Keratin 15, CD81/TAPA-1, CD9, Epithelial Specific Antigen (ESA), and Mast Cell Chymase as binding agents, and the proteins identified can be used as biomarkers for the vesicles. The biomarker can be present or absent, underexpressed or overexpressed, mutated, or modified in or on a vesicle and used in characterizing a condition.

[0298] An antibody or synthetic antibody to be used as a binding agent can also be identified through a peptide array. Another method is the use of synthetic antibody generation through antibody phage display. M13 bacteriophage libraries of antibodies (e.g. Fabs) are displayed on the surfaces of phage particles as fusions to a coat protein. Each phage particle displays a unique antibody and also encapsulates a vector that contains the encoding DNA. Highly diverse libraries can be constructed and represented as phage pools, which can be used in antibody selection for binding to immobilized antigens. Antigen-binding phages are retained by the immobilized antigen, and the nonbinding phages are removed by washing. The retained phage pool can be amplified by infection of an Escherichia coli host and the amplified pool can be used for additional rounds of selection to eventually obtain a population that is dominated by antigen-binding clones. At this stage, individual phase clones can be isolated and subjected to DNA sequencing to decode the sequences of the displayed antibodies. Through the use of phase display and other methods known in the art, high affinity designer antibodies for vesicles can be generated.

[0299] Bead-based assays can also be used to identify novel binding agents to isolate or detect a vesicle. A test antibody or peptide can be conjugated to a particle. For example, a bead can be conjugated to an antibody or peptide and used to detect and quantify the proteins expressed on the surface of a population of vesicles in order to discover and specifically select for novel antibodies that can target vesicles from specific tissue or tumor types. Any molecule of organic origin can be successfully conjugated to a polystyrene bead through use of a commercially available kit according to manufacturer's instructions. Each bead set can be colored a certain detectable wavelength and each can be linked to a known antibody or peptide which can be used to specifically measure which beads are linked to exosomal proteins matching the epitope of previously conjugated antibodies or peptides. The beads can be dyed with discrete fluorescence intensities such that each bead with a different intensity has a different binding agent as described above.

[0300] For example, a purified vesicle preparation can be diluted in assay buffer to an appropriate concentration according to empirically determined dynamic range of assay. A sufficient volume of coupled beads can be prepared and approximately 1 μl of the antibody-coupled beads can be aliquoted into a well and adjusted to a final volume of approximately 50 μl. Once the antibody-conjugated beads have been added to a vacuum compatible plate, the beads can be washed to ensure proper binding conditions. An appropriate volume of vesicle preparation can then be added to each well being tested and the mixture incubated, such as for 15-18 hours. A sufficient volume of detection antibodies using detection antibody diluent solution can be prepared and incubated with the mixture for 1 hour or more. The beads can then be washed before the addition of detection antibody (biotin expressing) mixture composed of streptavidin phycoereythin. The beads can then be washed and vacuum aspirated several times before analysis on a suspension array system using software provided with an instrument. The identity of antigens that can be used to selectively extract the vesicles can then be elucidated from the analysis.

[0301] Assays using imaging systems can be used to detect and quantify proteins expressed on the surface of a vesicle in order to discover and specifically select for and enrich vesicles from specific tissue, cell or tumor types. Antibodies, peptides or cells conjugated to multiple well multiplex carbon coated plates can be used. Simultaneous measurement of many analytes in a well can be achieved through the use of capture antibodies arrayed on the patterned carbon working surface. Analytes can then be detected with antibodies labeled with reagents in electrode wells with an enhanced electro-chemiluminescent plate. Any molecule of organic origin can be successfully conjugated to the carbon coated plate. Proteins expressed on the surface of vesicles can be identified from this assay and can be used as targets to specifically select for and enrich vesicles from specific tissue or tumor types.

[0302] The binding agent can also be an aptamer to a specific target. The term “specific” as used herein in regards to a binding agent can mean that an agent has a greater affinity for its target than other targets, typically with a much great affinity, but does not require that the binding agent is absolutely specific for its target.

[0303] Microfluidics

[0304] The methods for isolating or identifying vesicles can be used in combination with microfluidic devices. The methods of isolating or detecting a vesicle, such as described herein, can be performed using a microfluidic device. Microfluidic devices, which may also be referred to as “lab-on-a-chip” systems, biomedical micro-electro-mechanical systems (bioMEMs), or multicomponent integrated systems, can be used for isolating and analyzing a vesicle. Such systems miniaturize and compartmentalize processes that allow for binding of vesicles, detection of biosignatures, and other processes.

[0305] A microfluidic device can also be used for isolation of a vesicle through size differential or affinity selection. For example, a microfluidic device can use one more channels for isolating a vesicle from a biological sample based on size or by using one or more binding agents for isolating a vesicle from a biological sample. A biological sample can be introduced into one or more microfluidic channels, which selectively allows the passage of a vesicle. The selection can be based on a property of the vesicle, such as the size, shape, deformability, or biosignature of the vesicle.

[0306] In one embodiment, a heterogeneous population of vesicles can be introduced into a microfluidic device, and one or more different homogeneous populations of vesicles can be obtained. For example, different channels can have different size selections or binding agents to select for different vesicle populations. Thus, a microfluidic device can isolate a plurality of vesicles wherein at least a subset of the plurality of vesicles comprises a different biosignature from another subset of the plurality of vesicles. For example, the microfluidic device can isolate at least 2, 3, 4, 5, 6, 7, 8, 9, 10, 15, 20, 25, 30, 40, 50, 60, 70, 80, 90, or 100 different subsets of vesicles, wherein each subset of vesicles comprises a different biosignature.

[0307] In some embodiments, the microfluidic device can comprise one or more channels that permit further enrichment or selection of a vesicle. A population of vesicles that has been enriched after passage through a first channel can be introduced into a second channel, which allows the passage of the desired vesicle or vesicle population to be further enriched, such as through one or more binding agents present in the second channel.

[0308] Array-based assays and bead-based assays can be used with microfluidic device. For example, the binding agent can be coupled to beads and the binding reaction between the beads and vesicle can be performed in a microfluidic device. Multiplexing can also be performed using a microfluidic device. Different compartments can comprise different binding agents for different populations of vesicles, where each population is of a different cell-of-origin specific vesicle population. In one embodiment, each population has a different biosignature. The hybridization reaction between the microsphere and vesicle can be performed in a microfluidic device and the reaction mixture can be delivered to a detection device. The detection device, such as a dual or multiple laser detection system can be part of the microfluidic system and can use a laser to identify each bead or microsphere by its color-coding, and another laser can detect the hybridization signal associated with each bead.

[0309] Various microfluidic devices and methods are described above.

[0310] Combined Isolation Methodology

[0311] One of skill will appreciate that various methods of sample treatment and isolating and concentrating circulating biomarkers such as vesicles can be combined as desired. For example, a biological sample can be treated to prevent aggregation, remove undesired particulate and/or deplete highly abundant proteins. The steps used can be chosen to optimize downstream analysis steps. Next, biomarkers such as vesicles can be isolated, e.g., by chromotography, centrifugation, density gradient, filtration, precipitation, or affinity techniques. Any number of the later steps can be combined, e.g., a sample could be subjected to one or more of chromotography, centrifugation, density gradient, filtration and precipitation in order to isolate or concentrate all or most microvesicles. In a subsequent step, affinity techniques, e.g., using binding agents to one or more target of interest, can be used to isolate or identify microvesicles carrying desired biomarker profiles. Microfluidic systems can be employed to perform some or all of these steps.

[0312] An exemplary yet non-limiting isolation scheme for isolating and analysis of microvesicles includes the following: Plasma or serum collection->highly abundant protein removal->ultrafiltration->nanomembrane concentration->flow cytometry or particle-based assay.

[0313] Using the methods disclosed herein or known in the art, circulating biomarkers such as vesicles can be isolated or concentrated by at least about 2-fold, 3-fold, 1-fold, 2-fold, 3-fold, 4-fold, 5-fold, 6-fold, 7-fold, 8-fold, 9-fold, 10-fold, 12-fold, 15-fold, 20-fold, 25-fold, 30-fold, 35-fold, 40-fold, 45-fold, 50-fold, 55-fold, 60-fold, 65-fold, 70-fold, 75-fold, 80-fold, 90-fold, 95-fold, 100-fold, 110-fold, 120-fold, 125-fold, 130-fold, 140-fold, 150-fold, 160-fold, 170-fold, 175-fold, 180-fold, 190-fold, 200-fold, 205-fold, 250-fold, 275-fold, 300-fold, 325-fold, 350-fold, 375-fold, 400-fold, 425-fold, 450-fold, 475-fold, 500-fold, 525-fold, 550-fold, 575-fold, 600-fold, 625-fold, 650-fold, 675-fold, 700-fold, 725-fold, 750-fold, 775-fold, 800-fold, 825-fold, 850-fold, 875-fold, 900-fold, 925-fold, 950-fold, 975-fold, 1000-fold, 1500-fold, 2000-fold, 2500-fold, 3000-fold, 4000-fold, 5000-fold, 6000-fold, 7000-fold, 8000-fold, 9000-fold, or at least 10,000-fold. In some embodiments, the vesicles are isolated or concentrated concentrated by at least 1 order of magnitude, 2 orders of magnitude, 3 orders of magnitude, 4 orders of magnitude, 5 orders of magnitude, 6 orders of magnitude, 7 orders of magnitude, 8 orders of magnitude, 9 orders of magnitude, or 10 orders of magnitude or more.

[0314] Once concentrated or isolated, the circulating biomarkers can be assessed, e.g., in order to characterize a phenotype as described herein. In some embodiments, the concentration or isolation steps themselves shed light on the phenotype of interest. For example, affinity methods can detect the presence or level of specific biomarkers of interest.

[0315] The various isolation and detection systems described herein can be used to isolate or detect circulating biomarkers such as vesicles that are informative for diagnosis, prognosis, disease stratification, theranosis, prediction of responder/non-responder status, disease monitoring, treatment monitoring and the like as related to such diseases and disorders. Combinations of the isolation techniques are within the scope of the invention. In a non-limiting example, a sample can be run through a chromatography column to isolate vesicles based on a property such as size of electrophoretic motility, and the vesicles can then be passed through a microfluidic device. Binding agents can be used before, during or after these steps.

[0316] The methods and compositions of the invention can be used with microvesicles isolated or detected using such methods as described herein. In various non-limiting examples: an aptamer provided by the methods of the invention can be used as a capture and/or detector agent for a biomarker such as a protein or microvesicle; a sample such as a bodily fluid can be contacted with an oligonucleotide probe library of the invention before microvesicles in the sample are isolated using one or more technique described herein (e.g., chromatography, centrifugation, flow cytometry, filtration, affinity isolation, polymer precipitation, etc); microvesicles in a sample are isolated using one or more technique described herein (e.g., chromatography, centrifugation, flow cytometry, filtration, affinity isolation, polymer precipitation, etc) before contacting the microvesicles with an aptamer or oligonucleotide probe library of the invention. Contaminants such as highly abundant proteins can be removed in whole or in part at any appropriate step in such processes. These and various other useful iterations of such techniques for assessment of microvesicles and other biomarkers are contemplated by the invention.

### Biomarkers

[0317] As described herein, the methods and compositions of the invention can be used in assays to detect the presence or level of one or more biomarker of interest. The biomarker can be any useful biomarker disclosed herein or known to those of skill in the art. In an embodiment, the biomarker comprises a protein or polypeptide. As used herein, “protein,” “polypeptide” and “peptide” are used interchangeably unless stated otherwise. The biomarker can be a nucleic acid, including DNA, RNA, and various subspecies of any thereof as disclosed herein or known in the art. The biomarker can comprise a lipid. The biomarker can comprise a carbohydrate. The biomarker can also be a complex, e.g., a complex comprising protein, nucleic acids, lipids and/or carbohydrates. In some embodiments, the biomarker comprises a microvesicle. In an embodiment, the invention provides a method wherein a pool of aptamers is used to assess the presence and/or level of a population of microvesicles of interest without knowing the precise microvesicle antigen targeted by each member of the pool. See, e.g., FIGS. 12B-C. In other cases, biomarkers associated with microvesicles are assessed according to the methods of the invention. See, e.g., FIGS. 2A-F; FIG. 12A.

[0318] A biosignature comprising more than one biomarker can comprise one type of biomarker or multiple types of biomarkers. As a non-limiting example, a biosignature can comprise multiple proteins, multiple nucleic acids, multiple lipids, multiple carbohydrates, multiple biomarker complexes, multiple microvesicles, or a combination of any thereof. For example, the biosignature may comprise one or more microvesicle, one or more protein, and one or more microRNA, wherein the one or more protein and/or one or more microRNA is optionally in association with the microvesicle as a surface antigen and/or payload, as appropriate.

[0319] In some embodiments, vesicles are detected using vesicle surface antigens. A commonly expressed vesicle surface antigen can be referred to as a “housekeeping protein,” or general vesicle biomarker. The biomarker can be CD63, CD9, CD81, CD82, CD37, CD53, Rab-5b, Annexin V or MFG-E8. Tetraspanins, a family of membrane proteins with four transmembrane domains, can be used as general vesicle biomarkers. The tetraspanins include CD151, CD53, CD37, CD82, CD81, CD9 and CD63. There have been over 30 tetraspanins identified in mammals, including the TSPAN1 (TSP-1), TSPAN2 (TSP-2), TSPAN3 (TSP-3), TSPAN4 (TSP-4, NAG-2), TSPAN5 (TSP-5), TSPAN6 (TSP-6), TSPAN7 (CD231, TALLA-1, A15), TSPAN8 (CO-029), TSPAN9 (NET-5), TSPAN10 (Oculospanin), TSPAN11 (CD151-like), TSPAN12 (NET-2), TSPAN13 (NET-6), TSPAN14, TSPAN15 (NET-7), TSPAN16 (TM4-B), TSPAN17, TSPAN18, TSPAN19, TSPAN20 (UP1b, UPK1B), TSPAN21 (UP1a, UPK1A), TSPAN22 (RDS, PRPH2), TSPAN23 (ROM1), TSPAN24 (CD151), TSPAN25 (CD53), TSPAN26 (CD37), TSPAN27 (CD82), TSPAN28 (CD81), TSPAN29 (CD9), TSPAN30 (CD63), TSPAN31 (SAS), TSPAN32 (TSSC6), TSPAN33, and TSPAN34. Other commonly observed vesicle markers include those listed in Table 3. One or more of these proteins can be useful biomarkers for the characterizing a phenotype using the subject methods and compositions.

TABLE 3
Proteins Observed in Vesicles from Multiple Cell Types

| Class | Protein |
|---|---|
| Antigen Presentation | MHC class I, MHC class II, Integrins, Alpha 4 beta 1, Alpha M beta 2, |
| | Beta 2 |
| Immunoglobulin family | ICAM1/CD54, P-selection |
| Cell-surface peptidases | Dipeptidylpeptidase IV/CD26, Aminopeptidase n/CD13 |
| Tetraspanins | CD151, CD53, CD37, CD82, CD81, CD9 and CD63 |
| Heat-shock proteins | Hsp70, Hsp84/90 |
| Cytoskeletal proteins | Actin, Actin-binding proteins, Tubulin |
| Membrane transport | Annexin I, Annexin II, Annexin IV, Annexin V, Annexin VI, |
| and fusion | RAB7/RAP1B/RADGDI |
| Signal transduction | Gi2alpha/14-3-3, CBL/LCK |
| Abundant membrane | CD63, GAPDH, CD9, CD81, ANXA2, ENO1, SDCBP, MSN, MFGE8, |
| proteins | EZR, GK, ANXA1, LAMP2, DPP4, TSG101, HSPA1A, GDI2, CLTC, |
| | LAMP1, Cd86, ANPEP, TFRC, SLC3A2, RDX, RAP1B, RAB5C, |
| | RAB5B, MYH9, ICAM1, FN1, RAB11B, PIGR, LGALS3, ITGB1, |
| | EHD1, CLIC1, ATP1A1, ARF1, RAP1A, P4HB, MUC1, KRT10, HLA- |
| | A, FLOT1, CD59, C1orf58, BASP1, TACSTD1, STOM |
| Other Transmembrane | Cadherins: CDH1, CDH2, CDH12, CDH3, Deomoglein, DSG1, DSG2, |
| Proteins | DSG3, DSG4, Desmocollin, DSC1, DSC2, DSC3, Protocadherins, |
| | PCDH1, PCDH10, PCDH11x, PCDH11y, PCDH12, FAT, FAT2, FAT4, |
| | PCDH15, PCDH17, PCDH18, PCDH19; PCDH20; PCDH7, PCDH8, |
| | PCDH9, PCDHA1, PCDHA10, PCDHA11, PCDHA12, PCDHA13, |
| | PCDHA2, PCDHA3, PCDHA4, PCDHA5, PCDHA6, PCDHA7, |
| | PCDHA8, PCDHA9, PCDHAC1, PCDHAC2, PCDHB1, PCDHB10, |
| | PCDHB11, PCDHB12, PCDHB13, PCDHB14, PCDHB15, PCDHB16, |
| | PCDHB17, PCDHB18, PCDHB2, PCDHB3, PCDHB4, PCDHB5, |
| | PCDHB6, PCDHB7, PCDHB8, PCDHB9, PCDHGA1, PCDHGA10, |
| | PCDHGA11, PCDHGA12, PCDHGA2; PCDHGA3, PCDHGA4, |
| | PCDHGA5, PCDHGA6, PCDHGA7, PCDHGA8, PCDHGA9, |
| | PCDHGB1, PCDHGB2, PCDHGB3, PCDHGB4, PCDHGB5, |
| | PCDHGB6, PCDHGB7, PCDHGC3, PCDHGC4, PCDHGC5, CDH9 |
| | (cadherin 9, type 2 (T1-cadherin)), CDH10 (cadherin 10, type 2 (T2- |
| | cadherin)), CDH5 (VE-cadherin (vascular endothelial)), CDH6 (K- |
| | cadherin (kidney)), CDH7 (cadherin 7, type 2), CDH8 (cadherin 8, type |
| | 2), CDH11 (OB-cadherin (osteoblast)), CDH13 (T-cadherin - H-cadherin |
| | (heart)), CDH15 (M-cadherin (myotubule)), CDH16 (KSP-cadherin), |
| | CDH17 (LI cadherin (liver-intestine)), CDH18 (cadherin 18, type 2), |
| | CDH19 (cadherin 19, type 2), CDH20 (cadherin 20, type 2), CDH23 |
| | (cadherin 23, (neurosensory epithelium)), CDH10, CDH11, CDH13, |
| | CDH15, CDH16, CDH17, CDH18, CDH19, CDH22, CDH23, CDH24, |
| | CDH26, CDH28, CDH4, CDH5, CDH6, CDH7, CDH8, CDH9, |
| | CELSR1, CELSR2, CELSR3, CLSTN1, CLSTN2, CLSTN3, DCHS1, |
| | DCHS2, LOC389118, PCLKC, RESDA1, RET |

[0320] Any of the types of biomarkers or specific biomarkers described herein can be used and/or assessed via the subject methods and compositions, e.g., to identify a useful biosignature. Exemplary biomarkers include without limitation those in Table 4 of International Patent Application PCT/US2016/040157, filed Jun. 29, 2016, and published as WO2017004243 on Jan. 5, 2017, and PCT/US2016/044595, filed Jul. 28, 2016; which applications are incorporated by reference herein in their entirety. The markers can be detected as protein, RNA or DNA as appropriate, which can be circulating freely or in a complex with other biological molecules. As appropriate, the markers can also be used for capture and/or detection of vesicles for characterizing phenotypes as disclosed herein. In some cases, multiple capture and/or detectors are used to enhance the characterization. The markers can be detected as protein or as mRNA, which can be circulating freely or in a complex with other biological molecules. See, e.g., FIGS. 2D-E. The markers can be detected as vesicle surface antigens and/or vesicle payload. The “Illustrative Class” indicates indications for which the markers are known markers. Those of skill will appreciate that the markers can also be used in alternate settings in certain instances. For example, a marker which can be used to characterize one type disease may also be used to characterize another disease as appropriate. Consider a non-limiting example of a tumor marker which can be used as a biomarker for tumors from various lineages. The biomarker references in Table 3 are those commonly used in the art. Gene aliases and descriptions can be found using a variety of online databases, including GeneCards® (www.genecards.org), HUGO Gene Nomenclature (www.genenames.org), Entrez Gene (www.ncbi.nlm.nih.gov/entrez/query.fcgi?db=gene), UniProtKB/Swiss-Prot (www.uniprot.org), UniProtKB/TrEMBL (www.uniprot.org), OMIM (www.ncbi.nlm.nih.gov/entrez/query.fcgi?db=OMIM), GeneLoc (genecards.weizmann.ac.il/geneloc/), and Ensembl (www.ensembl.org). Generally, gene symbols and names below correspond to those approved by HUGO, and protein names are those recommended by UniProtKB/Swiss-Prot. Common alternatives are provided as well. Where a protein name indicates a precursor, the mature protein is also implied. Throughout the application, gene and protein symbols may be used interchangeably and the meaning can be derived from context as necessary. Examples of additional biomarkers that can be incorporated into the methods and compositions of the invention include without limitation those disclosed in International Patent Application Nos. PCT/US2012/042519 (WO 2012/174282), filed Jun. 14, 2012 and PCT/US2012/050030 (WO 2013/022995), filed Aug. 8, 2012.

[0321] In various embodiments of the invention, the biomarkers or biosignature used to detect or assess any of the conditions or diseases disclosed herein can comprise one or more biomarkers in one of several different categories of markers, wherein the categories include without limitation one or more of: 1) disease specific biomarkers; 2) cell- or tissue-specific biomarkers; 3) vesicle-specific markers (e.g., general vesicle biomarkers); 4. angiogenesis-specific biomarkers; and 5) immunomodulatory biomarkers. Examples of all such markers are disclosed herein and known to a person having ordinary skill in the art. Furthermore, a biomarker known in the art that is characterized to have a role in a particular disease or condition can be adapted for use as a target in compositions and methods of the invention. In further embodiments, such biomarkers that are associated with vesicles can be all vesicle surface markers, or a combination of vesicle surface markers and vesicle payload markers (i.e., molecules enclosed by a vesicle). The biomarkers assessed can be from a combination of sources. For example, a disease or disorder may be detected or characterized by assessing a combination of proteins, nucleic acids, vesicles, circulating biomarkers, biomarkers from a tissue sample, and the like. In addition, as noted herein, the biological sample assessed can be any biological fluid, or can comprise individual components present within such biological fluid (e.g., vesicles, nucleic acids, proteins, or complexes thereof).

[0322] EpCAM is a pan-epithelial differentiation antigen that is expressed on many tumor cells. It is intricately linked with the Cadherin-Catenin pathway and hence the fundamental WNT pathway responsible for intracellular signalling and polarity. It has been used as an immunotherapeutic target in the treatment of gastrointestinal, urological and other carcinomas. (Chaudry M A, Sales K, Ruf P, Lindhofer H, Winslet M C (April 2007). Br. J Cancer 96 (7): 1013-9.). It is expressed in undifferentiated pluripotent stem cells. EpCAM is a member of a family that includes at least two type I membrane proteins and functions as a homotypic calcium-independent cell adhesion molecule. Mutations in this gene result in congenital tufting enteropathy. EpCAM has been observed on the surface of microvesicles derived from cancer cell of various lineages. EpCAM is used as an exemplary surface antigen in various examples herein. One of skill will appreciate that various embodiments and examples using EpCAM can be applied to other microvesicle surface antigens as well.

### Oligonucleotide Probe Methods

[0323] Nucleic acid sequences fold into secondary and tertiary motifs particular to their nucleotide sequence. These motifs position the positive and negative charges on the nucleic acid sequences in locations that enable the sequences to bind to specific locations on target molecules, e.g., proteins and other amino acid sequences. These binding sequences are known in the field as aptamers. Due to the trillions of possible unique nucleotide sequences in even a relatively short stretch of nucleotides (e.g., 10, 11, 12, 13, 14, 15, 16, 17, 18, 19, 20, 21, 22, 23, 24, 25, 26, 27, 28, 29, 30, 31, 32, 33, 34, 35, 36, 37, 38, 39 or 40 nucleotides), a large variety of motifs can be generated, resulting in aptamers for almost any desired protein or other target.

[0324] Aptamers are created by randomly generating oligonucleotides of a specific length, typically 20-80 base pairs long, e.g., 20, 21, 22, 23, 24, 25, 26, 27, 28, 29, 30, 31, 32, 33, 34, 35, 36, 37, 38, 39, 40, 41, 42, 43, 44, 45, 46, 47, 48, 49, 50, 51, 52, 53, 54, 55, 56, 57, 58, 59, 60, 61, 62, 63, 64, 65, 66, 67, 68, 69, 70, 71, 72, 73, 74, 75, 76, 77, 78, 79 or 80 base pairs. These random oligonucleotides are then incubated with the protein target of interest. After several wash steps, the oligonucleotides that bind to the target are collected and amplified. The amplified aptamers are then added to the target and the process is repeated, often 15-20 times. A common version of this process known to those of skill in the art as the SELEX method.

[0325] The end result comprises one or more aptamer with high affinity to the target. The invention provides further processing of such resulting aptamers that can be use to provide desirable characteristics: 1) competitive binding assays to identify aptamers to a desired epitope; 2) motif analysis to identify high affinity binding aptamers in silico; and 3) microvesicle-based aptamer selection assays to identify aptamers that can be used to detect a particular disease. The methods are described in more detail below and further in the Examples.

[0326] The invention further contemplates aptamer sequences that are highly homologous to the sequences that are discovered by the methods of the invention. “High homology” typically refers to a homology of 40% or higher, preferably 60% or higher, more preferably 80% or higher, even more preferably 85%, 90%, 91%, 92%, 93%, 94%, 95%, 96%, 97%, 98%, 99% or higher between a polynucleotide sequence sequence and a reference sequence. In an embodiment, the reference sequence comprises the sequence of one or more aptamer provided herein. Percent homologies (also referred to as percent identity) are typically carried out between two optimally aligned sequences. Methods of alignment of sequences for comparison are well-known in the art. Optimal alignment of sequences and comparison can be conducted, e.g., using the algorithm in “Wilbur and Lipman, Proc Natl Acad Sci USA 80: 726-30 (1983)”. Homology calculations can also be performed using BLAST, which can be found on the NCBI server at: www.ncbi.nlm.nih.gov/BLAST/ (Altschul S F, et al, Nucleic Acids Res. 1997; 25(17):3389-402; Altschul S F, et al, J Mol. Biol. 1990; 215(3):403-10). In the case of an isolated polynucleotide which is longer than or equivalent in length to the reference sequence, e.g., a sequence identified by the methods herein, the comparison is made with the full length of the reference sequence. Where the isolated polynucleotide is shorter than the reference sequence, e.g., shorter than a sequence identified by the methods herein, the comparison is made to a segment of the reference sequence of the same length (excluding any loop required by the homology calculation).

[0327] The invention further contemplates aptamer sequences that are functional fragments of the sequences that are discovered by the methods of the invention. In the context of an aptamer sequence, a “functional fragment” of the aptamer sequence may comprise a subsequence that binds to the same target as the full length sequence. In some instances, a candidate aptamer sequence is from a member of a library that contains a 5′ leader sequences and/or a 3′ tail sequence. Such leader sequences or tail sequences may serve to facilitate primer binding for amplification or capture, etc. In these embodiments, the functional fragment of the full length sequence may comprise the subsequence of the candidate aptamer sequence absent the leader and/or tail sequences.

[0328] Competitive Antibody Addition

[0329] Known aptamer production methods may involve eluting all bound aptamers from the target sequence. In some cases, this is not sufficient to identify the desired aptamer sequence. For example, when trying to replace an antibody in an assay, it may be desirable to only collect aptamers that bind to the specific epitope of the antibody being replaced. The invention provides a method comprising addition of an antibody that is to be replaced to the aptamer/target reaction in order to allow for the selective collection of aptamers which bind to the antibody epitope. In an embodiment, the method comprises incubating a reaction mixture comprising randomly generated oligonucleotides with a target of interest, removing unbound aptamers from the reaction mixture that do not bind the target, adding an antibody to the reaction mixture that binds to that epitope of interest, and collecting the aptamers that are displaced by the antibody. The target can be a protein. See, e.g., FIG. 1, which illustrates the method for identifying an aptamer to a specific epitope of EpCam.

[0330] Motif Analysis

[0331] In most aptamer experiments, multiple aptamer sequences are identified that bind to the target. These aptamers will have various binding affinities. It can be time consuming and laborious to generate quantities of these many aptamers sufficient to assess the affinities of each. To identify large numbers of aptamers with the highest affinities without physically screening large subsets, the invention provides a method comprising the analysis of the two dimensional structure of one or more high affinity aptamers to the target of interest. In an embodiment, the method comprises screening the database for aptamers that have similar two-dimensional structures, or motifs, but not necessarily similar primary sequences. In an embodiment, the method comprises identifying a high affinity aptamer using traditional methods such as disclosed herein or known in the art (e.g. surface plasmon resonance binding assay, see FIG. 5), approximating the two-dimensional structure of the high affinity aptamer, and identifying aptamers from a pool of sequences that are predicted to have a similar two-dimensional structure to the high affinity aptamer. The method thereby provides a pool of candidates that also bind the target of interest. The two-dimensional structure of an oligo can be predicting using methods known in the art, e.g., via free energy (AG) calculations performed using a commercially available software program such as Vienna or mFold, for example as described in Mathews, D., Sabina, J., Zucker, M. & Turner, H. Expanded sequence dependence of thermodynamic parameters provides robust prediction of RNA secondary structure. J. Mol. Biol. 288, 911-940 (1999); Hofacker et al., Monatshefte f. Chemie 125: 167-188 (1994); and Hofacker, I. L. Vienna RNA secondary structure server. Nucleic Acids Res. 31, 3429-3431 (2003), the contents of which are incorporated herein by reference in their entirety. See FIGS. 3A-3B. The pool of sequences can be sequenced from a pool of randomly generated aptamer candidates using a high-throughput sequencing platform, such as the Ion Torrent platform from Life Technologies. Identifying aptamers from a pool of sequences that are predicted to have a similar two-dimensional structure to the high affinity aptamer may comprise loading the resulting sequences into the software program of choice to identify members of the pool of sequences with similar two-dimensional structures as the high affinity aptamer. The affinities of the pool of sequences can then be determined in situ, e.g., surface plasmon resonance binding assay or the like.

[0332] Aptamer Subtraction Methods

[0333] In order to develop an assay to detect a disease, for example, cancer, one typically screens a large population of known biomarkers from normal and diseased patients in order to identify markers that correlate with disease. This process only works if discriminating markers are already described. In order to address this problem, the invention provides a method comprising subtracting out non-discriminating aptamers from a large pool of aptamers by incubating them initially with non-target microvesicles or cells. The non-target cells can be normal cells or microvesicles shed therefrom. The aptamers that did not bind to the normal microvesicles or cells are then incubated with diseased microvesicles or cells. The aptamers that bind to the diseased microvesicles or cells but that did not bind to the normal cells are then possible candidates for an assay to detect the disease. This process is independent of knowing the existence of a particular marker in the diseased sample.

[0334] Subtraction methods can be used to identify aptamers that preferentially recognize a desired population of targets. In an embodiment, the subtraction method is used to identify aptamers that preferentially recognize target from a diseased target population over a control (e.g., normal or non-diseased) population. The diseased target population may be a population of vesicles from a diseased individual or individuals, whereas the control population comprises vesicles from a non-diseased individual or individuals. The disease can be a cancer or other disease disclosed herein or known in the art. Accordingly, the method provides aptamers that preferentially identify disease targets versus control targets.

[0335] Circulating microvesicles can be isolated from control samples, e.g., plasma from “normal” individuals that are absent a disease of interest, such as an absence of cancer. Vesicles in the sample are isolated using a method disclosed herein or as known in the art. For example, vesicles can be isolated from the plasma by one of the following methods: filtration, ultrafiltration, nanomembrane ultrafiltration, the ExoQuick reagent (System Biosciences, Inc., Mountain View, Calif.), centrifugation, ultracentrifugation, using a molecular crowding reagent (e.g., TEXIS from Life Technologies), polymer precipitation (e.g., polyethylene glycol (PEG)), affinity isolation, affinity selection, immunoprecipitation, chromatography, size exclusion, or a combination of any of these methods. The microvesicles isolated in each case will be a mixture of vesicle types and will be various sizes although ultracentrifugation methods may have more tendencies to produce exosomal-sized vesicles. Randomly generated oligonucleotide libraries (e.g., produced as described in the Examples herein) are incubated with the isolated normal vesicles. The aptamers that do not bind to these vesicles are isolated, e.g., by spinning down the vesicles and collecting the supernatant containing the non-binding aptamers. These non-binding aptamers are then contacted with vesicles isolated from diseased patients (e.g., using the same methods as described above) to allow the aptamers to recognize the disease vesicles. Next, aptamers that are bound to the diseased vesicles are collected. In an embodiment, the vesicles are isolated then lysed using a chaotropic agent (e.g., SDS or a similar detergent), and the aptamers are then captured by running the lysis mixture over an affinity column. The affinity column may comprise streptavidin beads in the case of biotin conjugated aptamer pools. The isolated aptamers are the amplified. The process can then then repeated, e.g., 1, 2, 3, 4, 5, 6, 7, 8, 9, 10, 11, 12, 13, 14, 15, 16, 17, 18, 19 or 20 or more times.

[0336] In one aspect of the invention, an aptamer profile is identified that can be used to characterize a biological sample of interest. In an embodiment, a pool of randomly generated oligonucleotides, e.g., at least 10, 10², 10³, 10⁴, 10⁵, 10⁶, 10⁷, 10⁸, 10⁹, 10¹⁰, 10¹¹, 10¹², 10¹³, 10¹⁴, 10¹⁵, 10¹⁶, 10¹⁷, 10¹⁸, 10¹⁹ or at least 10²⁰ oligonucleotides, is contacted with a biological component or target of interest from a control population. The oligonucleotides that do not bind the biological component or target of interest from the control population are isolated and then contacted with a biological component or target of interest from a test population. The oligonucleotides that bind the biological component or target of interest from the test population are retained. The retained oligonucleotides can be used to repeat the process by contacting the retained oligonucleotides with the biological component or target of interest from the control population, isolating the retained oligonucleotides that do not bind the biological component or target of interest from the control population, and again contacting these isolated oligonucleotides with the biological component or target of interest from the test population and isolating the binding oligonucleotides. The “component” or “target” can be anything that is present in sample to which the oligonucleotides are capable of binding (e.g., polypeptides, peptide, nucleic acid molecules, carbodyhrates, lipids, etc.). The process can be repeated any number of desired iterations, e.g., 1, 2, 3, 4, 5, 6, 7, 8, 9, 10, 11, 12, 13, 14, 15, 16, 17, 18, 19 or 20 or more times. The resulting oligonucleotides comprise aptamers that can differentially detect the test population versus the control. These aptamers provide an aptamer profile, which comprises a biosignature that is determined using one or more aptamer, e.g., a biosignature comprising a presence or level of the component or target which is detected using the one or more aptamer.

[0337] An exemplary process is illustrated in FIG. 4, which demonstrates the method to identify aptamer that preferentially recognize cancer vesicles using vesicles from normal (non-cancer) individuals as a control. In the figure, exosomes are exemplified but one of skill will appreciate that other microvesicles can be used in the same manner. The resulting aptamers can provide a profile that can differentially detect the cancer vesicles from the normal vesicles. One of skill will appreciate that the same steps can be used to derive an aptamer profile to characterize any disease or condition of interest.

[0338] In an embodiment, the invention provides an isolated polynucleotide that encodes a polypeptide, or a fragment thereof, identified by the methods above. The invention further provides an isolated polynucleotide having a nucleotide sequence that is at least 60% identical to the nucleotide sequence identified by the methods above. More preferably, the isolated nucleic acid molecule is at least 65%, 70%, 75%, 80%, 85%, 90%, 91%, 92%, 93%, 94%, 95%, 96%, 97%, 98%, 99% or more, identical to the nucleotide sequence identified by the methods above. In the case of an isolated polynucleotide which is longer than or equivalent in length to the reference sequence, e.g., a sequence identified by the methods above, the comparison is made with the full length of the reference sequence. Where the isolated polynucleotide is shorter than the reference sequence, e.g., shorter than a sequence identified by the methods above, the comparison is made to a segment of the reference sequence of the same length (excluding any loop required by the homology calculation).

[0339] In a related aspect, the invention provides a method of characterizing a biological phenotype using an aptamer profile. The aptamer profile can be determined using the method above. The aptamer profile can be determined for a test sample and compared to a control aptamer profile. The phenotype may be a disease or disorder such as a cancer. Characterizing the phenotype can include without limitation providing a diagnosis, prognosis, or theranosis. Thus, the aptamer profile can provide a diagnostic, prognostic and/or theranostic readout for the subject from whom the test sample is obtained.

[0340] In another embodiment, an aptamer profile is determined for a test sample by contacting a pool of aptamer molecules to the test sample, contacting the same pool of aptamers to a control sample, and identifying one or more aptamer molecules that differentially bind a component or target in the test sample but not in the control sample (or vice versa). A “component” or “target” as used in the context of the biological test sample or control sample can be anything that is present in sample to which the aptamers are capable of binding (e.g., polypeptides, peptide, nucleic acid molecules, carbodyhrates, lipids, etc.). For example, if a sample is a plasma or serum sample, the aptamer molecules may bind a polypeptide biomarker that is solely expressed or differentially expressed (over- or underexpressed) in a disease state as compared to a non-diseased subject. Comparison of the aptamer profile in the test sample as compared to the control sample may be based on qualitative and quantitative measure of aptamer binding (e.g., binding versus no binding, or level of binding in test sample versus different level of binding in the reference control sample).

[0341] In an aspect, the invention provides a method of identifying a target-specific aptamer profile, comprising contacting a biological test sample with a pool of aptamer molecules, contacting the pool to a control biological sample, identifying one or more aptamers that bind to a component in said test sample but not to the control sample, thereby identifying an aptamer profile for said biological test sample. In an embodiment, a pool of aptamers is selected against a disease sample and compared to a reference sample, the aptamers in a subset that bind to a component(s) in the disease sample but not in the reference sample can be sequenced using conventional sequencing techniques to identify the subset that bind, thereby identifying an aptamer profile for the particular disease sample. In this way, the aptamer profile provides an individualized platform for detecting disease in other samples that are screened. Furthermore, by selecting an appropriate reference or control sample, the aptamer profile can provide a diagnostic, prognostic and/or theranostic readout for the subject from whom the test sample is obtained.

[0342] In a related aspect, the invention provides a method of selecting a pool of aptamers, comprising: (a) contacting a biological control sample with a pool of oligonucleotides; (b) isolating a first subset of the pool of oligonucleotides that do not bind the biological control sample; (c) contacting the biological test sample with the first subset of the pool of oligonucleotides; and (d) isolating a second subset of the pool of oligonucleotides that bind the biological test sample, thereby selecting the pool of aptamers. The pool of oligonucleotides may comprise any number of desired sequences, e.g., at least 10, 10², 10³, 10⁴, 10⁵, 10⁶, 10⁷, 10⁸, 10⁹, 10¹⁰, 10¹¹, 10¹², 10¹³, 10¹⁴, 10¹⁵, 10¹⁶, 10¹⁷, 10¹⁸, 10¹⁹ or at least 10²⁰ oligonucleotides may be present in the starting pool. Steps (a)-(d) may be repeated to further hone the pool of aptamers. In an embodiment, these steps are repeated at least 1, 2, 3, 4, 5, 6, 7, 8, 9, 10, 11, 12, 13, 14, 15, 16, 17, 18, 19 or at least 20 times.

[0343] As described herein, the biological test sample and biological control sample may comprise microvesicles. In an embodiment, the biological test sample and optionally biological control sample comprise a bodily fluid. The bodily fluid may comprise without limitation peripheral blood, sera, plasma, ascites, urine, cerebrospinal fluid (CSF), sputum, saliva, bone marrow, synovial fluid, aqueous humor, amniotic fluid, cerumen, breast milk, broncheoalveolar lavage fluid, semen, prostatic fluid, Cowper's fluid, pre-ejaculatory fluid, female ejaculate, sweat, fecal matter, hair, tears, cyst fluid, pleural fluid, peritoneal fluid, malignant fluid, pericardial fluid, lymph, chyme, chyle, bile, interstitial fluid, menses, pus, sebum, vomit, vaginal secretions, mucosal secretion, stool water, pancreatic juice, lavage fluids from sinus cavities, bronchopulmonary aspirates or other lavage fluids. The biological test sample and optionally biological control may also comprise a tumor sample, e.g., cells from a tumor or tumor tissue. In other embodiments, the biological test sample and optionally biological control sample comprise a cell culture medium. In embodiments, the biological test sample comprises a diseased sample and the biological control sample comprises a non-diseased sample. Accordingly, the pool of aptamers may be used to provide a diagnostic, prognostic and/or theranostic readout a disease.

[0344] As noted, the invention can be used to assess microvesicles. Microvesicles are powerful biomarkers because the vesicles provide one biological entity that comprises multiple pieces of information. For example as described, a vesicle can have multiple surface antigens, each of which provides complementary information. Consider a cancer marker and a tissue specific marker. If both markers are individually present in a sample, e.g., both are circulating proteins or nucleic acids, it may not be ascertainable whether the cancer marker and the tissue specific marker are derived from the same anatomical locale. However, if both the cancer marker and the tissue specific marker are surface antigens on a single microvesicle, the vesicle itself links the two markers and provides an indication of a disease (via the cancer marker) and origin of the disease (via the tissue specific marker). Furthermore, the vesicle can have any number of surface antigens and also payload that can be assessed. Accordingly, the invention provides a method for identifying binding agents comprising contacting a plurality of extracellular microvesicles with a randomly generated library of binding agents, identifying a subset of the library of binding agents that have an affinity to one or more components of the extracellular microvesicles. The binding agents may comprise aptamers, antibodies, and/or any other useful type of binding agent disclosed herein or known in the art.

[0345] In a related aspect, the invention provides a method for identifying a plurality of target ligands comprising, (a) contacting a reference microvesicle population with a plurality of ligands that are capable of binding one or more microvesicle surface markers, (b) isolating a plurality of reference ligands, wherein the plurality of reference ligands comprise a subset of the plurality of ligands that do not have an affinity for the reference microvesicle population; (c) contacting one or more test microvesicle with the plurality of reference ligands; and (d) identifying a subset of ligands from the plurality of reference ligands that form complexes with a surface marker on the one or more test microvesicle, thereby identifying the plurality of target ligands. The term “ligand” can refer a molecule, or a molecular group, that binds to another chemical entity to form a larger complex. Accordingly, a binding agent comprises a ligand. The plurality of ligands may comprise aptamers, antibodies and/or other useful binding agents described herein or known in the art.

[0346] The invention further provides kits comprising one or more reagent to carry out the methods above. In an embodiment, the one or more reagent comprises a library of potential binding agents that comprises one or more of an aptamer, antibody, and other useful binding agents described herein or known in the art.

[0347] Negative and Positive Aptamer Selection

[0348] Aptamers can be used in various biological assays, including numerous types of assays which rely on a binding agent. For example, aptamers can be used instead of or along side antibodies in immune-based assays. The invention provides an aptamer screening method that identifies aptamers that do not bind to any surfaces (substrates, tubes, filters, beads, other antigens, etc.) throughout the assay steps and bind specifically to an antigen of interest. The assay relies on negative selection to remove aptamers that bind non-target antigen components of the final assay. The negative selection is followed by positive selection to identify aptamers that bind the desired antigen.

[0349] In an aspect, the invention provides a method of identifying an aptamer specific to a target of interest, comprising (a) contacting a pool of candidate aptamers with one or more assay components, wherein the assay components do not comprise the target of interest; (b) recovering the members of the pool of candidate aptamers that do not bind to the one or more assay components in (a); (c) contacting the members of the pool of candidate aptamers recovered in (b) with the target of interest in the presence of one or more confounding target; and (d) recovering a candidate aptamer that binds to the target of interest in step (c), thereby identifying the aptamer specific to the target of interest. In the method, steps (a) and (b) provide negative selection to remove aptamers that bind non-target entities. Conversely, steps (c) and (d) provide positive selection by identifying aptamers that bind the target of interest but not other confounding targets, e.g., other antigens that may be present in a biological sample which comprises the target of interest. The pool of candidate aptamers may comprise at least 10, 10², 10³, 10⁴, 10⁵, 10⁶, 10⁷, 10⁸, 10⁹, 10¹⁰, 10¹¹, 10¹², 10¹³, 10¹⁴, 10¹⁵, 10¹⁶, 10¹⁷, 10¹⁸, 10¹⁹ or at least 10²⁰ nucleic acid sequences. One illustrative approach for performing the method is provided in Example 7 of PCT/US2016/044595, filed Jul. 28, 2016 and incorporated by reference herein in its entirety.

[0350] In some embodiments, steps (a)-(b) are optional. In other embodiments, steps (a)-(b) are repeated at least 1, 2, 3, 4, 5, 6, 7, 8, 9, 10, 11, 12, 13, 14, 15, 16, 17, 18, 19 or at least 20 times before positive selection in step (c) is performed. The positive selection can also be performed in multiple rounds. Steps (c)-(d) can be repeated at least 1, 2, 3, 4, 5, 6, 7, 8, 9, 10, 11, 12, 13, 14, 15, 16, 17, 18, 19 or at least 20 times before identifying the aptamer specific to the target of interest. Multiple rounds may provide improved stringency of selection.

[0351] In some embodiments, the one or more assay components contacted with the aptamer pool during negative selection comprise one or more of a substrate, a bead, a planar array, a column, a tube, a well, or a filter. One of skill will appreciate that the assay components can include any substance that may be part of a biological assay.

[0352] The target of interest can be any appropriate entity that can be detected when recognized by an aptamer. In an embodiment, the target of interest comprises a protein or polypeptide. As used herein, “protein,” “polypeptide” and “peptide” are used interchangeably unless stated otherwise. The target of interest can be a nucleic acid, including DNA, RNA, and various subspecies of any thereof as disclosed herein or known in the art. The target of interest can comprise a lipid. The target of interest can comprise a carbohydrate. The target of interest can also be a complex, e.g., a complex comprising protein, nucleic acids, lipids and/or carbohydrates. In some embodiments, the target of interest comprises a microvesicle. In such cases, the aptamer can be a binding agent to a microvesicle surface antigen, e.g., a protein. General microvesicle surface antigens include tetraspanin, CD9, CD63, CD81, CD63, CD9, CD81, CD82, CD37, CD53, Rab-5b, Annexin V, and MFG-E8. Additional general microvesicle surface antigens are provided in Table 3 herein.

[0353] The microvesicle surface antigen can also be a biomarker of a disease or disorder. In such cases, the aptamer may be used to provide a diagnosis, prognosis or theranosis of the disease or disorder. For example, the one or more protein may comprise one or more of PSMA, PCSA, B7H3, EpCam, ADAM-10, BCNP, EGFR, IL1B, KLK2, MMP7, p53, PBP, SERPINB3, SPDEF, SSX2, and SSX4. These markers can be used detect a prostate cancer. Additional microvesicle surface antigens are provided in Table 3 herein and Table 4 of International Patent Application PCT/US2016/040157, filed Jun. 29, 2016, and published as WO2017004243 on Jan. 5, 2017.

[0354] The one or more confounding target can be an antigen other than the target of interest. For example, a confounding target can be another entity that may be present in a sample to be assayed. As a non-limiting example, consider that the sample to be assessed is a plasma sample from an individual. The target of interest may be a protein, e.g., a microvesicle surface antigen, which is present in the sample. In this case, a confounding target could be selected from any other antigen that is likely to be present in the plasma sample. Accordingly, the positive selection should provide candidate aptamers that recognize the target of interest but have minimal, if any, interactions with the confounding targets. In some embodiments, the target of interest and the one or more confounding target comprise the same type of biological entity, e.g., all protein, all nucleic acid, all carbohydrate, or all lipids. As a non-limiting example, the target of interest can be a protein selected from the group consisting of SSX4, SSX2, PBP, KLK2, SPDEF, and EpCAM, and the one or more confounding target comprises the other members of this group. In other embodiments, the target of interest and the one or more confounding target comprise different types of biological entities, e.g., any combination of protein, nucleic acid, carbohydrate, and lipids. The one or more confounding targets may also comprise different types of biological entities, e.g., any combination of protein, nucleic acid, carbohydrate, and lipids.

[0355] In an embodiment, the invention provides an isolated polynucleotide, or a fragment thereof, identified by the methods above. The invention further provides an isolated polynucleotide having a nucleotide sequence that is at least 60% identical to the nucleotide sequence identified by the methods above. More preferably, the isolated nucleic acid molecule is at least 65%, 70%, 75%, 80%, 85%, 90%, 91%, 92%, 93%, 94%, 95%, 96%, 97%, 98%, 99% or more, identical to the nucleotide sequence identified by the methods above. In the case of an isolated polynucleotide which is longer than or equivalent in length to the reference sequence, e.g., a sequence identified by the methods above, the comparison is made with the full length of the reference sequence. Where the isolated polynucleotide is shorter than the reference sequence, e.g., shorter than a sequence identified by the methods above, the comparison is made to a segment of the reference sequence of the same length (excluding any loop required by the homology calculation).

[0356] In a related aspect, the invention provides a method of selecting a group of aptamers, comprising: (a) contacting a pool of aptamers to a population of microvesicles from a first sample; (b) enriching a subpool of aptamers that show affinity to the population of microvesicles from the first sample; (c) contacting the subpool to a second population of microvesicles from a second sample; and (d) depleting a second subpool of aptamers that show affinity to the second population of microvesicles from the second sample, thereby selecting the group of aptamers that have preferential affinity for the population of microvesicles from the first sample.

[0357] The first sample and/or second sample may comprise a biological fluid such as disclosed herein. For example, the biological fluid may include without limitation blood, a blood derivative, plasma, serum or urine. The first sample and/or second sample may also be derived from a cell culture.

[0358] In an embodiment, the first sample comprises a cancer sample and the second sample comprises a control sample, such as a non-cancer sample. The first sample and/or and the second sample may each comprise a pooled sample. For example, the first sample and/or second sample can comprise bodily fluid from 2, 3, 4, 5, 6, 7, 8, 9, 10, 11, 12, 13, 14, 15, 16, 17, 18, 19, 20, 25, 30, 40, 50, 60, 70, 80, 90, 100 or more than 100 individuals. In such cases, the members of a pool may be chosen to represent a desired phenotype. In a non-limiting example, the members of the first sample pool may be from patients with a cancer and the members of the second sample pool may be from non-cancer controls.

[0359] Steps (a)-(d) can be repeated a desired number of times in order to further enrich the pool in aptamers that have preferential affinity for the population of microvesicles from the first sample. For example, steps (a)-(d) can be repeated 1, 2, 3, 4, 5, 6, 7, 8, 9, 10, 11, 12, 13, 14, 15, 16, 17, 18, 19, 20 or more than 20 times. The output from step (d) can be used as the input to repeated step (a). In embodiment, the first sample and/or second sample are replaced with a different sample before repeating steps (a)-(d). In a non-limiting example, members of a first sample pool may be from patients with a cancer and members of a second sample pool may be from non-cancer controls. During subsequent repetitions of steps (a)-(d), the first sample pool may comprise samples from different cancer patients than in the prior round/s. Similarly, the second sample pool may comprise samples from different controls than in the prior round/s.

[0360] In still another related aspect, the invention provides a method of enriching a plurality of oligonucleotides, comprising: (a) contacting a first microvesicle population with the plurality of oligonucleotides; (b) fractionating the first microvesicle population contacted in step (a) and recovering members of the plurality of oligonucleotides that fractionated with the first microvesicle population; (c) contacting the recovering members of the plurality of oligonucleotides from step (b) with a second microvesicle population; (d) fractionating the second microvesicle population contacted in step (c) and recovering members of the plurality of oligonucleotides that did not fractionate with the second microvesicle population; (e) contacting the recovering members of the plurality of oligonucleotides from step (d) with a third microvesicle population; and (f) fractionating the third microvesicle population contacted in step (a) and recovering members of the plurality of oligonucleotides that fractionated with the third microvesicle population; thereby enriching the plurality of oligonucleotides. The first and third microvesicle populations may have a first phenotype while the second microvesicle population has a second phenotype. Thus, positive selection occurs for the microvesicle populations associated with the first phenotype and negative selection occurs for the microvesicle populations associated with the second phenotype. An example of such selection schemes is described in Example 18 of PCT/US2016/044595, filed Jul. 28, 2016, wherein the first phenotype comprises biopsy-positive breast cancer and the second phenotype comprises non-breast cancer (biopsy-negative or healthy).

[0361] In some embodiments, the first phenotype comprises a medical condition, disease or disorder and the second phenotype comprises a healthy state or a different state of the medical condition, disease or disorder. The first phenotype can be a healthy state and the second phenotype comprises a medical condition, disease or disorder. The medical condition, disease or disorder can be any detectable medical condition, disease or disorder, including without limitation a cancer, a premalignant condition, an inflammatory disease, an immune disease, an autoimmune disease or disorder, a cardiovascular disease or disorder, neurological disease or disorder, infectious disease or pain. Various types of such conditions are disclosed herein. See, e.g., Section “Phenotypes” herein.

[0362] Any useful method to isolate microvesicles in whole or in part can be used to fractionate the samples. See, e.g., Section “Microvesicle Isolation and Analysis” herein. In an embodiment, the fractionating comprises ultracentrifugation in step (b) and polymer precipitation in steps (d) and (f). The polymer can be polyethylene glycol (PEG). Any appropriate form of PEG may be used. For example, the PEG may be PEG 8000. The PEG may be used at any appropriate concentration. For example, the PEG can be used at a concentration of 1%, 2%, 3%, 4%, 5%, 6%, 7%, 8%, 9%, 10%, 11%, 12%, 13%, 14% or 15% to isolate the microvesicles. In some embodiments, the PEG is used at a concentration of 6%.

[0363] The contacting can be performed in the presence of a competitor, which may reduce non-specific binding events. Any useful competitor can be used. In an embodiment, the competitor comprises at least one of salmon sperm DNA, tRNA, dextran sulfate and carboxymethyl dextran. As desired, different competitors or competitor concentrations can be used at different contacting steps.

[0364] The method can be repeated to achieve a desired enrichment. In an embodiment, steps (a)-(f) are repeated at least once. These steps can be repeated 1, 2, 3, 4, 5, 6, 7, 8, 9, 10, 11, 12, 13, 14, 15, 16, 17, 18, 19, 20, or more than 20 times as desired. At the same time, each of the contacting steps can be repeated as desired. In some embodiments, the method further comprises: (i) repeating steps (a)-(b) at least once prior to step (c), wherein the recovered members of the plurality of oligonucleotides that fractionated with the first microvesicle population in step (b) are used as the input plurality of oligonucleotides for the repetition of step (a); (ii) repeating steps (c)-(d) at least once prior to step (e), wherein the recovered members of the plurality of oligonucleotides that did not fractionate with the second microvesicle population in step (d) are used as the input plurality of oligonucleotides for the repetition of step (c); and/or (iii) repeating steps (e)-(f) at least once, wherein the recovered members of the plurality of oligonucleotides that fractionated with the third microvesicle population in step (f) are used as the input plurality of oligonucleotides for the repetition of step (e). Repetitions (i)-(iii) can be repeated any desired number of times, e.g., (i)-(iii) can be repeated 1, 2, 3, 4, 5, 6, 7, 8, 9, 10, 11, 12, 13, 14, 15, 16, 17, 18, 19, 20 or more than 20 times. In an embodiment, (i)-(iii) each comprise three repetitions.

[0365] The method may further comprise identifying the members of the selected group of aptamers or oligonucleotides, e.g., by DNA sequencing. The sequencing may be performed by Next Generation sequencing as desired and after or before any desired step in the method.

[0366] The method may also comprise identifying the targets of the selected group of aptamers/oligonucleotides. Methods to identify such targets are disclosed herein.

[0367] Oligonucleotide Probe Target Identification

[0368] The methods and kits above can be used to identify binding agents that differentiate between two biomarker populations. The invention further provides methods of identifying the targets of binding agent. For example, the methods may further comprise identifying a surface marker of a target microvesicle that is recognized by the binding agent.

[0369] In an embodiment, the invention provides a method of identifying a target of a binding agent comprising: (a) contacting the binding agent with the target to bind the target with the binding agent, wherein the target comprises a surface antigen of a microvesicle; (b) disrupting the microvesicle under conditions which do not disrupt the binding of the target with the binding agent; (c) isolating the complex between the target and the binding agent; and (d) identifying the target bound by the binding agent. The binding agent can be a binding agent identified by the methods above, e.g., an aptamer, ligand, antibody, or other useful binding agent that can differentiate between two populations of biomarkers.

[0370] An illustrative schematic for carrying on the method is shown in FIG. 7. The figure shows a binding agent 702, here an oligonucleotide probe or aptamer for purposes of illustration, tethered to a substrate 701. The binding agent 702 can be covalently attached to substrate 701. The binding agent 702 may also be non-covalently attached. For example, binding agent 702 can comprise a label which can be attracted to the substrate, such as a biotin group which can form a complex with an avidin/streptavidin molecule that is covalently attached to the substrate. This can allow a complex to be formed between the aptamer and the microvesicle while in solution, followed by capture of the aptamer using the biotin label. The binding agent 702 binds to a surface antigen 703 of microvesicle 704. In the step signified by arrow (i), the microvesicle is disrupted while leaving the complex between the binding agent 702 and surface antigen 703 intact. Disrupted microvesicle 705 is removed, e.g., via washing or buffer exchange, in the step signified by arrow (ii). In the step signified by arrow (iii), the surface antigen 703 is released from the binding agent 702. The surface antigen 703 can be analyzed to determine its identity using methods disclosed herein and/or known in the art. The target of the method can be any useful biological entity associated with a microvesicle. For example, the target may comprise a protein, nucleic acid, lipid or carbohydrate, or other biological entity disclosed herein or known in the art.

[0371] In some embodiments of the method, the target is cross-linked to the binding agent prior disrupting the microvesicle. Without being bound by theory, this step may assist in maintaining the complex between the binding agent and the target while the vesicle is disrupted. Any useful method of crosslinking disclosed herein or known in the art can be used. In embodiments, the cross-linking comprises photocrosslinking, an imidoester crosslinker, dimethyl suberimidate, an N-Hydroxysuccinimide-ester crosslinker, bissulfosuccinimidyl suberate (BS3), an aldehyde, acrolein, crotonaldehyde, formaldehyde, a carbodiimide crosslinker, N,N′-dicyclohexylcarbodiimide (DDC), N,N′-diisopropylcarbodiimide (DIC), 1-Ethyl-3-[3-dimethylaminopropyl]carbodiimide hydrochloride (EDC or EDAC), Succinimidyl-4-(N-maleimidomethyl)cyclohexane-1-carboxylate (SMCC), a Sulfosuccinimidyl-4-(N-maleimidomethyl)cyclohexane-1-carboxylate (Sulfo-SMCC), a Sulfo-N-hydroxysuccinimidyl-2-(6-[biotinamido]-2-(p-azido benzamido)-hexanoamido) ethyl-1,3′-dithioproprionate (Sulfo-SBED), 2-[N2-(4-Azido-2,3,5,6-tetrafluorobenzoyl)-N6-(6-biotin-aminocaproyl)-L-lysinyl]ethyl methanethiosulfonate (Mts-Atf-Biotin; available from Thermo Fisher Scientific Inc, Rockford Ill.), 2-{N2-[N6-(4-Azido-2,3,5,6-tetrafluorobenzoyl-6-amino-caproyl)-N6-(6-biotinamidocaproyl)-L-lysinylamido]}ethyl methanethiosultonate (Mts-Atf-LC-Biotin; available from Thermo Fisher Scientific Inc), a photoreactive amino acid (e.g., L-Photo-Leucine and L-Photo-Methionine, see, e.g., Suchanek, M., et al. (2005). Photo-leucine and photo-methionine allow identification of protein-protein interactions. Nat. Methods 2:261-267), an N-Hydroxysuccinimide (NHS) crosslinker, an NHS-Azide reagent (e.g., NHS-Azide, NHS-PEG4-Azide, NHS-PEG12-Azide; each available from Thermo Fisher Scientific, Inc.), an NHS-Phosphine reagent (e.g., NHS-Phosphine, Sulfo-NHS-Phosphine; each available from Thermo Fisher Scientific, Inc.), or any combination or modification thereof.

[0372] A variety of methods can be used to disrupt the microvesicle. For example, the vesicle membrane can be disrupted using mechanical forces, chemical agents, or a combination thereof. In embodiments, disrupting the microvesicle comprises use of one or more of a detergent, a surfactant, a solvent, an enzyme, or any useful combination thereof. The enzyme may comprise one or more of lysozyme, lysostaphin, zymolase, cellulase, mutanolysin, a glycanase, a protease, and mannase. The detergent or surfactant may comprise one or more of a octylthioglucoside (OTG), octyl beta-glucoside (OG), a nonionic detergent, Triton X, Tween 20, a fatty alcohol, a cetyl alcohol, a stearyl alcohol, cetostearyl alcohol, an oleyl alcohol, a polyoxyethylene glycol alkyl ether (Brij), octaethylene glycol monododecyl ether, pentaethylene glycol monododecyl ether, a polyoxypropylene glycol alkyl ether, a glucoside alkyl ether, decyl glucoside, lauryl glucoside, octyl glucoside, a polyoxyethylene glycol octylphenol ethers, a polyoxyethylene glycol alkylphenol ether, nonoxynol-9, a glycerol alkyl ester, glyceryl laurate, a polyoxyethylene glycol sorbitan alkyl esters, polysorbate, a sorbitan alkyl ester, cocamide MEA, cocamide DEA, dodecyldimethylamine oxide, a block copolymers of polyethylene glycol and polypropylene glycol, poloxamers, polyethoxylated tallow amine (POEA), a zwitterionic detergent, 3-[(3-cholamidopropyl)dimethylammonio]-1-propane sulfonate (CHAPS), a linear alkylbenzene sulfonate (LAS), a alkyl phenol ethoxylate (APE), cocamidopropyl hydroxysultaine, a betaine, cocamidopropyl betaine, lecithin, an ionic detergent, sodium dodecyl sulfate (SDS), cetrimonium bromide (CTAB), cetyl trimethylammonium chloride (CTAC), octenidine dihydrochloride, cetylpyridinium chloride (CPC), benzalkonium chloride (BAC), benzethonium chloride (BZT), 5-Bromo-5-nitro-1,3-dioxane, dimethyldioctadecylammonium chloride, dioctadecyldimethylammonium bromide (DODAB), sodium deoxycholate, nonyl phenoxypolyethoxylethanol (Tergitol-type NP-40; NP-40), ammonium lauryl sulfate, sodium laureth sulfate (sodium lauryl ether sulfate (SLES)), sodium myreth sulfate, an alkyl carboxylate, sodium stearate, sodium lauroyl sarcosinate, a carboxylate-based fluorosurfactant, perfluorononanoate, perfluorooctanoate (PFOA or PFO), and a biosurfactant. Mechanical methods of disruption that can be used comprise without limitation mechanical shear, bead milling, homogenation, microfluidization, sonication, French Press, impingement, a colloid mill, decompression, osmotic shock, thermolysis, freeze-thaw, desiccation, or any combination thereof.

[0373] As shown in FIG. 7, the binding agent may be tethered to a substrate. The binding agent can be tethered before or after the complex between the binding agent and target is formed. The substrate can be any useful substrate such as disclosed herein or known in the art. In an embodiment, the substrate comprises a microsphere. In another embodiment, the substrate comprises a planar substrate. The binding agent can also be labeled. Isolating the complex between the target and the binding agent may comprise capturing the binding agent via the label. For example, the label can be a biotin label. In such cases, the binding agent can be attached to the substrate via a biotin-avidin binding event.

[0374] Methods of identifying the target after release from the binding agent will depend on the type of target of interest. For example, when the target comprises a protein, identifying the target may comprise use of mass spectrometry (MS), peptide mass fingerprinting (PMF; protein fingerprinting), sequencing, N-terminal amino acid analysis, C-terminal amino acid analysis, Edman degradation, chromatography, electrophoresis, two-dimensional gel electrophoresis (2D gel), antibody array, and immunoassay. Nucleic acids can be identified by sequencing.

[0375] One of skill will appreciate that the method can be used to identify any appropriate target, including those not associated with a vesicle. For example, with respect to the FIG. 7, all steps except for the step signified by arrow (i) (i.e., disrupting the microvesicle), could be performed for a circulating target such as a protein, nucleic acid, lipid, carbohydrate, or combination thereof. The target can be any useful target, including without limitation a cell, an organelle, a protein complex, a lipoprotein, a carbohydrate, a microvesicle, a virus, a membrane fragment, a small molecule, a heavy metal, a toxin, a drug, a nucleic acid, mRNA, microRNA, a protein-nucleic acid complex, and various combinations, fragments and/or complexes of any of these.

[0376] In an aspect, the invention provides a method of identifying at least one protein associated with at least one microvesicle in a biological sample, comprising: a) contacting the at least one microvesicle with an oligonucleotide probe library, b) isolating at least one protein bound by at least one member of the oligonucleotide probe library in step a); and c) identifying the at least one protein isolated in step b). The isolating can be performed using any useful method such as disclosed herein, e.g., by immunopreciption or capture to a substrate. Similarly, the identifying can be performed using any useful method such as disclosed herein, including without limitation use of mass spectrometry, 2-D gel electrophoresis or an antibody array. Examples of such methodology are presented herein in Examples 15-17.

[0377] The targets identified by the methods of the invention can be detected, e.g., using the oligonucleotide probes of the invention, for various purposes as desired. For example, an identified microvesicle surface antigen can then be used to detect a microvesicle. In an aspect, the invention provides a method of detecting at least one microvesicle in a biological sample comprising contacting the biological sample with at least one binding agent to at least one microvesicle surface antigen and detecting the at least one microvesicle recognized by the binding agent to the at least one protein. In an embodiment, the at least one microvesicle surface antigen is selected from Table 3 herein and Table 4 of International Patent Application PCT/US2016/040157, filed Jun. 29, 2016, and published as WO2017004243 on Jan. 5, 2017. The at least one microvesicle surface antigen can be a protein in any of Tables 10-17. See Example 15. The at least one binding agent may comprise any useful binding agent, including without limitation a nucleic acid, DNA molecule, RNA molecule, antibody, antibody fragment, aptamer, peptoid, zDNA, peptide nucleic acid (PNA), locked nucleic acid (LNA), unlocked nucleic acid (UNA), lectin, peptide, dendrimer, membrane protein labeling agent, chemical compound, or a combination thereof. In some embodiments, the at least one binding agent comprises at least one oligonucleotide, such as an oligonucleotide probe as provided herein.

[0378] The at least one binding agent can be used to capture and/or detect the at least one microvesicle. Methods of detecting biomarkers and microvesicle using binding agents are provided herein. See, e.g., FIGS. 2A-B, which figures describe sandwich assay formats. In some embodiments, the at least one binding agent used to capture the at least one microvesicle is bound to a substrate. Any useful substrate can be used, including without limitation a planar array, a column matrix, or a microbead. See, e.g., FIGS. 2A-B. In some embodiments, the at least one binding agent used to detect the at least one microvesicle is labeled. Various useful labels are provided herein or known in the art, including without limitation a magnetic label, a fluorescent moiety, an enzyme, a chemiluminescent probe, a metal particle, a non-metal colloidal particle, a polymeric dye particle, a pigment molecule, a pigment particle, an electrochemically active species, a semiconductor nanocrystal, a nanoparticle, a quantum dot, a gold particle, a fluorophore, or a radioactive label.

[0379] In an embodiment, the detecting is used to characterize a phenotype. The phenotype can be any appropriate phenotype of interest. In some embodiments, the phenotype is a disease or disorder. The characterizing may comprise providing diagnostic, prognostic and/or theranostic information for the disease or disorder. The characterizing may be performed by comparing a presence or level of the at least one microvesicle to a reference. The reference can be selected per the characterizing to be performed. For example, when the phenotype comprises a disease or disorder, the reference may comprise a presence or level of the at least one microvesicle in a sample from an individual or group of individuals without the disease or disorder. The comparing can be determining whether the presence or level of the microvesicle differs from that of the reference. In some embodiments, the detected at least one microvesicle is found at higher levels in a healthy sample as compared to a diseased sample. In another embodiment, the detected at least one microvesicle is found at higher levels in a diseased sample as compared to a healthy sample. When multiplex assays are performed, e.g., using a plurality of binding agents to different biomarkers, some microvesicle antigens may be observed at a higher level in the biological samples as compared to the reference whereas other microvesicle antigens may be observed at a lower level in the biological samples as compared to the reference.

[0380] The method can be used to detect the at least one microvesicle in any appropriate biological sample. For example, the biological sample may comprise a bodily fluid, tissue sample or cell culture. The bodily fluid or tissue sample can be from a subject having or suspected of having a medical condition, a disease or a disorder. Thus, the method can be used to provide a diagnostic, prognostic, or theranostic read out for the subject. Any appropriate bodily fluid can be used, including without limitation peripheral blood, sera, plasma, ascites, urine, cerebrospinal fluid (CSF), sputum, saliva, bone marrow, synovial fluid, aqueous humor, amniotic fluid, cerumen, breast milk, broncheoalveolar lavage fluid, semen, prostatic fluid, cowper's fluid or pre-ejaculatory fluid, female ejaculate, sweat, fecal matter, hair oil, tears, cyst fluid, pleural and peritoneal fluid, pericardial fluid, lymph, chyme, chyle, bile, interstitial fluid, menses, pus, sebum, vomit, vaginal secretions, mucosal secretion, stool water, pancreatic juice, lavage fluids from sinus cavities, bronchopulmonary aspirates, blastocyl cavity fluid, or umbilical cord blood.

[0381] The method of the invention can be used to detect or characterize any appropriate disease or disorder of interest, including without limitation Breast Cancer, Alzheimer's disease, bronchial asthma, Transitional cell carcinoma of the bladder, Giant cellular osteoblastoclastoma, Brain Tumor, Colorectal adenocarcinoma, Chronic obstructive pulmonary disease (COPD), Squamous cell carcinoma of the cervix, acute myocardial infarction (AMI)/acute heart failure, Chron's Disease, diabetes mellitus type II, Esophageal carcinoma, Squamous cell carcinoma of the larynx, Acute and chronic leukemia of the bone marrow, Lung carcinoma, Malignant lymphoma, Multiple Sclerosis, Ovarian carcinoma, Parkinson disease, Prostate adenocarcinoma, psoriasis, Rheumatoid Arthritis, Renal cell carcinoma, Squamous cell carcinoma of skin, Adenocarcinoma of the stomach, carcinoma of the thyroid gland, Testicular cancer, ulcerative colitis, or Uterine adenocarcinoma.

[0382] In some embodiments, the disease or disorder comprises a cancer, a premalignant condition, an inflammatory disease, an immune disease, an autoimmune disease or disorder, a cardiovascular disease or disorder, neurological disease or disorder, infectious disease or pain. The cancer can include without limitation one of acute lymphoblastic leukemia; acute myeloid leukemia; adrenocortical carcinoma; AIDS-related cancers; AIDS-related lymphoma; anal cancer; appendix cancer; astrocytomas; atypical teratoid/rhabdoid tumor; basal cell carcinoma; bladder cancer; brain stem glioma; brain tumor (including brain stem glioma, central nervous system atypical teratoid/rhabdoid tumor, central nervous system embryonal tumors, astrocytomas, craniopharyngioma, ependymoblastoma, ependymoma, medulloblastoma, medulloepithelioma, pineal parenchymal tumors of intermediate differentiation, supratentorial primitive neuroectodermal tumors and pineoblastoma); breast cancer; bronchial tumors; Burkitt lymphoma; cancer of unknown primary site; carcinoid tumor; carcinoma of unknown primary site; central nervous system atypical teratoid/rhabdoid tumor; central nervous system embryonal tumors; cervical cancer; childhood cancers; chordoma; chronic lymphocytic leukemia; chronic myelogenous leukemia; chronic myeloproliferative disorders; colon cancer; colorectal cancer; craniopharyngioma; cutaneous T-cell lymphoma; endocrine pancreas islet cell tumors; endometrial cancer; ependymoblastoma; ependymoma; esophageal cancer; esthesioneuroblastoma; Ewing sarcoma; extracranial germ cell tumor; extragonadal germ cell tumor; extrahepatic bile duct cancer; gallbladder cancer; gastric (stomach) cancer; gastrointestinal carcinoid tumor; gastrointestinal stromal cell tumor; gastrointestinal stromal tumor (GIST); gestational trophoblastic tumor; glioma; hairy cell leukemia; head and neck cancer; heart cancer; Hodgkin lymphoma; hypopharyngeal cancer; intraocular melanoma; islet cell tumors; Kaposi sarcoma; kidney cancer; Langerhans cell histiocytosis; laryngeal cancer; lip cancer; liver cancer; lung cancer; malignant fibrous histiocytoma bone cancer; medulloblastoma; medulloepithelioma; melanoma; Merkel cell carcinoma; Merkel cell skin carcinoma; mesothelioma; metastatic squamous neck cancer with occult primary; mouth cancer; multiple endocrine neoplasia syndromes; multiple myeloma; multiple myeloma/plasma cell neoplasm; mycosis fungoides; myelodysplastic syndromes; myeloproliferative neoplasms; nasal cavity cancer; nasopharyngeal cancer; neuroblastoma; Non-Hodgkin lymphoma; nonmelanoma skin cancer; non-small cell lung cancer; oral cancer; oral cavity cancer; oropharyngeal cancer; osteosarcoma; other brain and spinal cord tumors; ovarian cancer; ovarian epithelial cancer; ovarian germ cell tumor; ovarian low malignant potential tumor; pancreatic cancer; papillomatosis; paranasal sinus cancer; parathyroid cancer; pelvic cancer; penile cancer; pharyngeal cancer; pineal parenchymal tumors of intermediate differentiation; pineoblastoma; pituitary tumor; plasma cell neoplasm/multiple myeloma; pleuropulmonary blastoma; primary central nervous system (CNS) lymphoma; primary hepatocellular liver cancer; prostate cancer; rectal cancer; renal cancer; renal cell (kidney) cancer; renal cell cancer; respiratory tract cancer; retinoblastoma; rhabdomyosarcoma; salivary gland cancer; Sezary syndrome; small cell lung cancer; small intestine cancer; soft tissue sarcoma; squamous cell carcinoma; squamous neck cancer; stomach (gastric) cancer; supratentorial primitive neuroectodermal tumors; T-cell lymphoma; testicular cancer; throat cancer; thymic carcinoma; thymoma; thyroid cancer; transitional cell cancer; transitional cell cancer of the renal pelvis and ureter; trophoblastic tumor; ureter cancer; urethral cancer; uterine cancer; uterine sarcoma; vaginal cancer; vulvar cancer; Waldenstrom macroglobulinemia; or Wilm's tumor. The premalignant condition can include without limitation Barrett's Esophagus. The autoimmune disease can include without limitation one of inflammatory bowel disease (IBD), Crohn's disease (CD), ulcerative colitis (UC), pelvic inflammation, vasculitis, psoriasis, diabetes, autoimmune hepatitis, multiple sclerosis, myasthenia gravis, Type I diabetes, rheumatoid arthritis, psoriasis, systemic lupus erythematosis (SLE), Hashimoto's Thyroiditis, Grave's disease, Ankylosing Spondylitis Sjogrens Disease, CREST syndrome, Scleroderma, Rheumatic Disease, organ rejection, Primary Sclerosing Cholangitis, or sepsis. The cardiovascular disease can include without limitation one of atherosclerosis, congestive heart failure, vulnerable plaque, stroke, ischemia, high blood pressure, stenosis, vessel occlusion or a thrombotic event. The neurological disease can include without limitation one of Multiple Sclerosis (MS), Parkinson's Disease (PD), Alzheimer's Disease (AD), schizophrenia, bipolar disorder, depression, autism, Prion Disease, Pick's disease, dementia, Huntington disease (HD), Down's syndrome, cerebrovascular disease, Rasmussen's encephalitis, viral meningitis, neurospsychiatric systemic lupus erythematosus (NPSLE), amyotrophic lateral sclerosis, Creutzfeldt-Jacob disease, Gerstmann-Straussler-Scheinker disease, transmissible spongiform encephalopathy, ischemic reperfusion damage (e.g. stroke), brain trauma, microbial infection, or chronic fatigue syndrome. The pain can include without limitation one of fibromyalgia, chronic neuropathic pain, or peripheral neuropathic pain. The infectious disease can include without limitation one of a bacterial infection, viral infection, yeast infection, Whipple's Disease, Prion Disease, cirrhosis, methicillin-resistant Staphylococcus aureus, HIV, HCV, hepatitis, syphilis, meningitis, malaria, tuberculosis, or influenza. One of skill will appreciate that oligonucleotide probes or plurality of oligonucleotides or methods of the invention can be used to assess any number of these or other related diseases and disorders.

[0383] In a related aspect, the invention provides a kit comprising a reagent for carrying out the methods herein. In still another related aspect, the invention provides for use of a reagent for carrying out the methods. The reagent may comprise at least one binding agent to the at least one protein. The binding agent may be an oligonucleotide probe as provided herein.

[0384] Sample Characterization

[0385] The aptamers of the invention can be used to characterize a biological sample. For example, an aptamer can be used to bind a biomarker in the sample. The presence or level of the bound biomarker can indicate a characteristic of the example, such as a diagnosis, prognosis or theranosis of a disease or disorder associated with the sample.

[0386] In an aspect, the invention provides an aptamer comprising a nucleic acid sequence that is at least about 50, 55, 60, 65, 70, 75, 80, 85, 90, 95, 96, 97, 98, 99 or 100 percent homologous to sequences disclosed herein or a functional variation or fragment of any such sequence. A functional variation or fragment includes a sequence comprising modifications that is still capable of binding a target molecule, wherein the modifications comprise without limitation at least one of a deletion, insertion, point mutation, truncation or chemical modification. In a related aspect, the invention provides a method of characterizing a disease or disorder, comprising: (a) contacting a biological test sample with one or more aptamer of the invention, e.g., any of those in this paragraph or modifications thereof, (b) detecting a presence or level of a complex between the one or more aptamer and the target bound by the one or more aptamer in the biological test sample formed in step (a); (c) contacting a biological control sample with the one or more aptamer; (d) detecting a presence or level of a complex between the one or more aptamer and the target bound by the one or more aptamer in the biological control sample formed in step (c); and (e) comparing the presence or level detected in steps (b) and (d), thereby characterizing the disease or disorder.

[0387] The biological test sample and biological control sample can each comprise a tissue sample, a cell culture, or a biological fluid. In some embodiments, the biological test sample and biological control sample comprise the same sample type, e.g., both are tissue samples or both are fluid samples. In other embodiments, different sample types may be used for the test and control samples. For example, the control sample may comprise an engineered or otherwise artificial sample.

[0388] The biological fluid may comprise a bodily fluid. The bodily fluid may include without limitation one or more of peripheral blood, sera, plasma, ascites, urine, cerebrospinal fluid (CSF), sputum, saliva, bone marrow, synovial fluid, aqueous humor, amniotic fluid, cerumen, breast milk, broncheoalveolar lavage fluid, semen, prostatic fluid, cowper's fluid or pre-ejaculatory fluid, female ejaculate, sweat, fecal matter, hair, tears, cyst fluid, pleural and peritoneal fluid, pericardial fluid, lymph, chyme, chyle, bile, interstitial fluid, menses, pus, sebum, vomit, vaginal secretions, mucosal secretion, stool water, pancreatic juice, lavage fluids from sinus cavities, bronchopulmonary aspirates, blastocyl cavity fluid, or umbilical cord blood. In some embodiments, the bodily fluid comprises blood, serum or plasma.

[0389] The biological fluid may comprise microvesicles. For example, the biological fluid can be a tissue, cell culture, or bodily fluid which comprises microvesicles released from cells in the sample. The microvesicles can be circulating microvesicles.

[0390] The one or more aptamer can bind a target biomarker, e.g., a biomarker useful in characterizing the sample. The biomarker may comprise a polypeptide or fragment thereof, or other useful biomarker described herein or known in the art (lipid, carbohydrate, complex, nucleic acid, etc). In embodiments, the polypeptide or fragment thereof is soluble or membrane bound. Membrane bound polypeptides may comprise a cellular surface antigen or a microvesicle surface antigen. The biomarker can be a biomarker selected from Table 3 herein and Table 4 of International Patent Application PCT/US2016/040157, filed Jun. 29, 2016, and published as WO2017004243 on Jan. 5, 2017.

[0391] The characterizing can comprises a diagnosis, prognosis or theranosis of the disease or disorder. Various diseases and disorders can be characterized using the compositions and methods of the invention, including without limitation a cancer, a premalignant condition, an inflammatory disease, an immune disease, an autoimmune disease or disorder, a cardiovascular disease or disorder, a neurological disease or disorder, an infectious disease, and/or pain. See, e.g., section herein “Phenotypes” for further details. In embodiments, the disease or disorder comprises a proliferative or neoplastic disease or disorder. For example, the disease or disorder can be a cancer. In some embodiments, the cancer comprises a breast cancer, ovarian cancer, prostate cancer, lung cancer, colorectal cancer, melanoma, or brain cancer.

[0392] FIG. 12A is a schematic 1200 showing an assay configuration that can be used to detect and/or quantify a target of interest using one or more aptamer of the invention. Capture aptamer 1202 is attached to substrate 1201. The substrate can be a planar substrate, well, microbead, or other useful substrate as disclosed herein or known in the art. Target of interest 1203 is bound by capture aptamer 1202. The target of interest can be any appropriate entity that can be detected when recognized by an aptamer or other binding agent. The target of interest may comprise a protein or polypeptide, a nucleic acid, including DNA, RNA, and various subspecies thereof, a lipid, a carbohydrate, a complex, e.g., a complex comprising protein, nucleic acids, lipids and/or carbohydrates. In some embodiments, the target of interest comprises a microvesicle. The target of interest can be a microvesicle surface antigen. The target of interest may be a biomarker, including a vesicle associated biomarker, in Table 3 herein and Table 4 of International Patent Application PCT/US2016/040157, filed Jun. 29, 2016, and published as WO2017004243 on Jan. 5, 2017. The microvesicle input can be isolated from a sample using various techniques as described herein, e.g., chromatography, filtration, centrifugation, flow cytometry, affinity capture (e.g., to a planar surface, column or bead), and/or using microfluidics. Detection aptamer 1204 is also bound to target of interest 1203. Detection aptamer 1204 carries label 1205 which can be detected to identify target captured to substrate 1201 via capture aptamer 1202. The label can be a fluorescent, radiolabel, enzyme, or other detectable label as disclosed herein. Either capture aptamer 1202 or detection aptamer 1204 can be substituted with another binding agent, e.g., an antibody. For example, the target may be captured with an antibody and detected with an aptamer, or vice versa. When the target of interest comprises a complex, the capture and detection agents (aptamer, antibody, etc) can recognize the same or different targets. For example, when the target is a microvesicle, the capture agent may recognize one microvesicle surface antigen while the detection agent recognizes another microvesicle surface antigen. Alternately, the capture and detection agents can recognize the same surface antigen.

[0393] The aptamers of the invention may be identified and/or used for various purposes in the form of DNA or RNA. Unless otherwise specified, one of skill in the art will appreciate that an aptamer may generally be synthesized in various forms of nucleic acid. The aptamers may also carry various chemical modifications and remain within the scope of the invention.

[0394] In some embodiments, an aptamer of the invention is modified to comprise at least one chemical modification. The modification may include without limitation a chemical substitution at a sugar position; a chemical substitution at a phosphate position; and a chemical substitution at a base position of the nucleic acid. In some embodiments, the modification is selected from the group consisting of: biotinylation, incorporation of a fluorescent label, incorporation of a modified nucleotide, a 2′-modified pyrimidine, 3′ capping, conjugation to an amine linker, conjugation to a high molecular weight, non-immunogenic compound, conjugation to a lipophilic compound, conjugation to a drug, conjugation to a cytotoxic moiety, and labeling with a radioisotope, or other modification as disclosed herein. The position of the modification can be varied as desired. For example, the biotinylation, fluorescent label, or cytotoxic moiety can be conjugated to the 5′ end of the aptamer. The biotinylation, fluorescent label, or cytotoxic moiety can also be conjugated to the 3′ end of the aptamer.

[0395] In some embodiments, the cytotoxic moiety is encapsulated in a nanoparticle. The nanoparticle can be selected from the group consisting of: liposomes, dendrimers, and comb polymers. In other embodiments, the cytotoxic moiety comprises a small molecule cytotoxic moiety. The small molecule cytotoxic moiety can include without limitation vinblastine hydrazide, calicheamicin, vinca alkaloid, a cryptophycin, a tubulysin, dolastatin-10, dolastatin-15, auristatin E, rhizoxin, epothilone B, epithilone D, taxoids, maytansinoids and any variants and derivatives thereof. In still other embodiments, the cytotoxic moiety comprises a protein toxin. For example, the protein toxin can be selected from the group consisting of diphtheria toxin, ricin, abrin, gelonin, and Pseudomonas exotoxin A. Non-immunogenic, high molecular weight compounds for use with the invention include polyalkylene glycols, e.g., polyethylene glycol. Appropriate radioisotopes include yttrium-90, indium-111, iodine-131, lutetium-177, copper-67, rhenium-186, rhenium-188, bismuth-212, bismuth-213, astatine-211, and actinium-225. The aptamer may be labeled with a gamma-emitting radioisotope.

[0396] In some embodiments of the invention, an active agent is conjugated to the aptamer. For example, the active agent may be a therapeutic agent or a diagnostic agent. The therapeutic agent may be selected from the group consisting of tyrosine kinase inhibitors, kinase inhibitors, biologically active agents, biological molecules, radionuclides, adriamycin, ansamycin antibiotics, asparaginase, bleomycin, busulphan, cisplatin, carboplatin, carmustine, capecotabine, chlorambucil, cytarabine, cyclophosphamide, camptothecin, dacarbazine, dactinomycin, daunorubicin, dexrazoxane, docetaxel, doxorubicin, etoposide, epothilones, floxuridine, fludarabine, fluorouracil, gemcitabine, hydroxyurea, idarubicin, ifosfamide, irinotecan, lomustine, mechlorethamine, mercaptopurine, melphalan, methotrexate, rapamycin (sirolimus), mitomycin, mitotane, mitoxantrone, nitrosurea, paclitaxel, pamidronate, pentostatin, plicamycin, procarbazine, rituximab, streptozocin, teniposide, thioguanine, thiotepa, taxanes, vinblastine, vincristine, vinorelbine, taxol, combretastatins, discodermolides, transplatinum, anti-vascular endothelial growth factor compounds (“anti-VEGFs”), anti-epidermal growth factor receptor compounds (“anti-EGFRs”), 5-fluorouracil and derivatives, radionuclides, polypeptide toxins, apoptosis inducers, therapy sensitizers, enzyme or active fragment thereof, and combinations thereof.

[0397] Oligonucleotide Pools to Characterize a Sample

[0398] The complexity and heterogeneity present in biology challenges the understanding of biological systems and disease. Diversity exists at various levels, e.g., within and between cells, tissues, individuals and disease states. See, e.g., FIG. 13A. FIG. 13B overviews various biological entities that can be assessed to characterize such samples. As shown in the Figure, as one moves from assessing DNA, to RNA, to protein, and finally to protein complexes, the amount of diversity and complexity increases dramatically. The oligonucleotide probe library method of the invention can be used characterize complex biological sources, e.g., tissue samples, cells, circulating tumor cells, microvesicles, and complexes such as protein and proteolipid complexes.

[0399] Current methods to characterize biological samples may not adequately address such complexity and diversity. As shown in FIG. 13C, such current methods often have a trade off between measuring diversity and complexity. As an example, consider high throughput sequencing technology. Next generation approaches may query many 1000s of molecular targets in a single assay. However, such approaches only probe individual DNA and/or RNA molecules, and thus miss out on the great diversity of proteins and biological complexes. On the other hand, flow cytometry can probe biological complexes, but are limited to a small number of pre-defined ligands. For example, a single assay can probe a handful of differentially labeled antibodies to pre-defined targets.

[0400] The oligonucleotide probe library of the invention address the above challenges with current biological detection technologies. The size of the starting library can be adjusted to measure as many different entities as there are library members. In this Example, the initial untrained oligonucleotide library has the potential to measure 10¹² or more biological features. A larger and/or different library can be constructed as desired. The technology is adapted to find differences between samples without assumptions about what “should be different.” For example, the probe library may distinguish based on individual proteins, protein modifications, protein complexes, lipids, nucleic acids, different folds or conformations, or whatever is there that distinguishes a sample of interest. Thus, the method provides an unbiased approach to identify differences in biological samples that can be used to identify different populations of interest.

[0401] In the context herein, the use of the oligonucleotide library probe to assess a sample may be referred to as Adaptive Dynamic Artificial Poly-ligand Targeting, or ADAPT™ (previously referred to as Topological Oligonucleotide Profiling: TOP™). Although as noted the terms aptamer and oligonucleotides are typically used interchangeable herein, some differences between “classic” individual aptamers and ADAPT probes are as follows. Individual aptamers may comprise individual oligonucleotides selected to bind to a known specific target in an antibody-like “key-in-lock” binding mode. They may be evaluated individually based on specificity and binding affinity to the intended target. However, ADAPT probes may comprise a library of oligonucleotides intended to produce multi-probe signatures. The ADAPT probes comprise numerous potential binding modalities (electrostatic, hydrophobic, Watson-Crick, multi-oligo complexes, etc.). The ADAPT probe signatures have the potential to identify heterogeneous patient subpopulations. For example, a single ADAPT probe library can be assembled to differentiate multiple disease states, as demonstrated herein. Unlike classic single aptamers, the binding targets may or may not be isolated or identified. It will be understood that screening methods that identify individual aptamers, e.g., SELEX, can also be used to enrich a naive library of oligonucleotides to identify a ADAPT probe library.

[0402] The general method of the invention is outlined in FIG. 13D. One input to the method comprises a randomized oligonucleotide library with the potential to measure 10¹² or more biological features. As outlined in the figure, the method identifies a desired number (e.g., ˜10⁵-10⁶) that are different between two input sample types. The randomized oligonucleotide library is contacted with a first and a second sample type, and oligonucleotides that bind to each sample are identified. The bound oligonucleotide populations are compared and oligonucleotides that specifically bind to one or the other biological input sample are retained for the oligonucleotide probe library, whereas oligonucleotides that bind both biological input samples are discarded. This trained oligonucleotide probe library can then be contacted with a new test sample and the identities of oligonucleotides that bind the test sample are determined. The test sample is characterized based on the profile of oligonucleotides that bound. See, e.g., FIG. 13H.

[0403] Extracellular vesicles provide an attractive vehicle to profile the biological complexity and diversity driven by many inter-related sources. There can be a great deal of heterogeneity between patient-to-patient microvesicle populations, or even in microvesicle populations from a single patient under different conditions (e.g., stress, diet, exercise, rest, disease, etc). Diversity of molecular phenotypes within microvesicle populations in various disease states, even after microvesicle isolation and sorting by vesicle biomarkers, can present challenges identifying surface binding ligands. This situation is further complicated by vesicle surface-membrane protein complexes. The oligonucleotide probe library can be used to address such challenges and allow for characterization of biological phenotypes. The approach combines the power of diverse oligonucleotide libraries and high throughput (next-generation) sequencing technologies to probe the complexity of extracellular microvesicles. See FIG. 13E.

[0404] ADAPT™ profiling may provide quantitative measurements of dynamic events in addition to detection of presence/absence of various biomarkers in a sample. For example, the binding probes may detect protein complexes or other post-translation modifications, allowing for differentiation of samples with the same proteins but in different biological configurations. Such configurations are illustrated in FIGS. 13F-G. In FIG. 13F, microvesicles with various surface markers are shown from an example microvesicle sample population: Sample Population A. The indicated Bound Probing Oligonucleotides 1301 are contacted to two surface markers 1302 and 1303 in a given special relationship. Here, probes unique to these functional complexes and spatial relationships may be retained. In contrast, in microvesicle Sample Population B shown in FIG. 13F, the two surface markers 1302 and 1303 are found in disparate special relationship. Here, probes 1301 are not bound due to absence of the spatial relationship of the interacting components 1302 and 1303.

[0405] An illustrative approach 1310 for using ADAPT profiling to assess a sample is shown in FIG. 13H. The probing library 1311 is mixed with sample 1312. The sample can be as described herein, e.g., a bodily fluid from a subject having or suspected of having a disease. The probes are allowed to bind the sample 1320 and the microvesicles are pelleted 1315. The supernatant 1314 comprising unbound oligonucleotides is discarded. Oligonucleotide probes bound to the pellet 1315 are eluted 1316 and sequenced 1317. The profile 1318 generated by the bound oligonucleotide probes as determined by the sequencing 1317 is used to characterize the sample 1312. For example, the profile 1318 can be compared to a reference, e.g., to determine if the profile is similar or different from a reference profile indicative of a disease or healthy state, or other phenotypic characterization of interest. The comparison may indicate the presence of a disease, provide a diagnosis, prognosis or theranosis, or otherwise characterize a phenotype associated with the sample 1312. FIG. 13I illustrates another schematic for using TOP™ profiling to characterize a phenotype. A patient sample such as a bodily fluid disclosed herein is collected 1321. The sample is contacted with the ADAPT™ library pool 1322. Microvesicles (MVs) are isolated from the contacted sample 1323, e.g., using ultracentrifugation, filtration, polymer precipitation or other appropriate technique or combination of techniques disclosed herein. Oligonucleotides that bound the isolated microvesicles are collected and identity is determined 1324. The identity of the bound oligonucleotides can be determined by any useful technique such as sequencing, high throughput sequencing (e.g., NGS), amplification including without limitation qPCR, or hybridization such as to a planar or particle based array. The identity of the bound oligonucleotides is used to characterize the sample, e.g., as containing disease related microvesicles.

[0406] In an aspect, the invention provides a method of characterizing a sample by contacting the sample with a pool of different oligonucleotides (e.g., an aptamer pool), and determining the frequency at which various oligonucleotides in the pool bind the sample. For example, a pool of oligonucleotides is identified that preferentially bind to microvesicles from cancer patients as compared to non-cancer patients. A test sample, e.g., from a patient suspected of having the cancer, is collected and contacted with the pool of oligonucleotides. Oligonucleotides that bind the test sample are eluted from the test sample, collected and identified, and the composition of the bound oligonucleotides is compared to those known to bind cancer samples. Various sequencing, amplification and hybridization techniques can be used to identify the eluted oligonucleotides. For example, when a large pool of oligonucleotides is used, oligonucleotide identification can be performed by high throughput methods such as next generation sequencing or via hybridization. If the test sample is bound by the oligonucleotide pool in a similar manner (e.g., as determined by bioinformatics classification methods) to the microvesicles from cancer patients, then the test sample is indicative of cancer as well. Using this method, a pool of oligonucleotides that bind one or more microvesicle antigen can be used to characterize the sample without necessarily knowing the precise target of each member of the pool of oligonucleotides. Examples 18-19 and others herein illustrate embodiments of the invention.

[0407] In an aspect, the invention provides a method for characterizing a condition for a test sample comprising: contacting a microvesicle sample with a plurality of oligonucleotide capable of binding one or more target(s) present in said microvesicle sample, identifying a set of oligonucleotides that form a complex with the sample wherein the set is predetermined to characterize a condition for the sample, thereby characterizing a condition for a sample.

[0408] In an related aspect, the invention provides a method for identifying a set of oligonucleotides associated with a test sample, comprising: (a) contacting a microvesicle sample with a plurality of oligonucleotides, isolating a set of oligonucleotides that form a complex with the microvesicle sample, (b) determining sequence and/or copy number for each of the oligonucleotides, thereby identifying a set of oligonucleotides associated with the test sample.

[0409] In still another related aspect, the invention provides a method of diagnosing a sample as cancerous or predisposed to be cancerous, comprising contacting a microvesicle sample with a plurality of oligonucleotides that are predetermined to preferentially form a complex with microvesicles from a cancer sample as compared to microvesicles from a non-cancer sample.

[0410] The oligonucleotides can be identified by sequencing, e.g., by dye termination (Sanger) sequencing or high throughput methods. High throughput methods can comprise techniques to rapidly sequence a large number of nucleic acids, including next generation techniques such as Massively parallel signature sequencing (MPSS; Polony sequencing; 454 pyrosequencing; Illumina (Solexa) sequencing; SOLiD sequencing; Ion Torrent semiconductor sequencing; DNA nanoball sequencing; Heliscope single molecule sequencing; Single molecule real time (SMRT) sequencing, or other methods such as Nanopore DNA sequencing; Tunneling currents DNA sequencing; Sequencing by hybridization; Sequencing with mass spectrometry; Microfluidic Sanger sequencing; Microscopy-based techniques; RNAP sequencing; In vitro virus high-throughput sequencing. The oligonucleotides may also be identified by hybridization techniques. For example, a microarray having addressable locals to hybridize and thereby detect the various members of the pool can be used. Alternately, detection can be based on one or more differentially labelled oligonucleotides that hybridize with various members of the oligonucleotide pool. The detectable signal of the label can be associated with a nucleic acid molecule that hybridizes with a stretch of nucleic acids present in various oligonucleotides. The stretch can be the same or different as to one or more oligonucleotides in a library. The detectable signal can comprise fluorescence agents, including color-coded barcodes which are known, such as in U.S. Patent Application Pub. No. 20140371088, 2013017837, and 20120258870. Other detectable labels (metals, radioisotopes, etc) can be used as desired.

[0411] The plurality or pool of oligonucleotides can comprise any desired number of oligonucleotides to allow characterization of the sample. In various embodiments, the pool comprises at least 2, 3, 4, 5, 6, 7, 8, 9, 10, 11, 12, 13, 14, 15, 16, 17, 18, 19, 20, 25, 30, 40, 50, 60, 70, 80, 90, 100, 150, 200, 250, 300, 350, 400, 450, 500, 600, 700, 800, 900, 1000, 2000, 3000, 4000, 5000, 6000, 7000, 8000, 9000, or at least 10000 different oligonucleotide members.

[0412] The plurality of oligonucleotides can be pre-selected through one or more steps of positive or negative selection, wherein positive selection comprises selection of oligonucleotides against a sample having substantially similar characteristics compared to the test sample, and wherein negative selection comprises selection of oligonucleotides against a sample having substantially different characteristics compared to the test sample. Substantially similar characteristics mean that the samples used for positive selection are representative of the test sample in one or more characteristic of interest. For example, the samples used for positive selection can be from cancer patients or cell lines and the test sample can be a sample from a patient having or suspected to have a cancer. Substantially different characteristics mean that the samples used for negative selection differ from the test sample in one or more characteristic of interest. For example, the samples used for negative selection can be from individuals or cell lines that do not have cancer (e.g., “normal” or otherwise “control” samples) and the test sample can be a sample from a patient having or suspected to have a cancer. The cancer can be a breast cancer, ovarian cancer, prostate cancer, lung cancer, colorectal cancer, melanoma, brain cancer, or other cancer.

[0413] By selecting samples representative of the desired phenotypes to detect and/or distinguish, the characterizing can comprise a diagnosis, prognosis or theranosis for any number of diseases or disorders. Various diseases and disorders can be characterized using the compositions and methods of the invention, including without limitation a cancer, a premalignant condition, an inflammatory disease, an immune disease, an autoimmune disease or disorder, a cardiovascular disease or disorder, a neurological disease or disorder, an infectious disease, and/or pain. See, e.g., section herein “Phenotypes” for further details. In embodiments, the disease or disorder comprises a proliferative or neoplastic disease or disorder. For example, the disease or disorder can be a cancer. In some embodiments, the cancer comprises a breast cancer, ovarian cancer, prostate cancer, lung cancer, colorectal cancer, melanoma, or brain cancer.

[0414] FIG. 12B is a schematic 1210 showing use of an oligonucleotide pool to characterize a phenotype of a sample, such as those listed above. A pool of oligonucleotides to a target of interest is provided 1211. For example, the pool of oligonucleotides can be enriched to target one or more microvesicle. The members of the pool may bind different targets (e.g., a microvesicle surface antigen) or different epitopes of the same target present on the one or more microvesicle. The pool is contacted with a test sample to be characterized 1212. For example, the test sample may be a biological sample from an individual having or suspected of having a given disease or disorder. The mixture is washed to remove unbound oligonucleotides. The remaining oligonucleotides are eluted or otherwise disassociated from the sample and collected 1213. The collected oligonucleotides are identified, e.g., by sequencing or hybridization 1214. The presence and/or copy number of the identified is used to characterize the phenotype 1215. For example, the pool of oligonucleotides may be chosen as oligonucleotides that preferentially recognize microvesicles shed from cancer cells. The method can be employed to detect whether the sample retains oligonucleotides that bind the cancer-related microvesicles, thereby allowing the sample to be characterized as cancerous or not.

[0415] FIG. 12C is a schematic 1220 showing an implementation of the method in FIG. 12B. A pool of oligonucleotides identified as binding a microvesicle population is provided 1219. The input sample comprises a test sample comprising microvesicles 1222. For example, the test sample may be a biological sample from an individual having or suspected of having a given disease or disorder. The pool is contacted with the isolated microvesicles to be characterized 1223. The microvesicle population can be isolated before or after the contacting 1223 from the sample using various techniques as described herein, e.g., chromatography, filtration, ultrafiltration, centrifugation, ultracentrifugation, flow cytometry, affinity capture (e.g., to a planar surface, column or bead), polymer precipitation, and/or using microfluidics. The mixture is washed to remove unbound oligonucleotides and the remaining oligonucleotides are eluted or otherwise disassociated from the sample and collected 1224. The collected oligonucleotides are identified 1225 and the presence and/or copy number of the retained oligonucleotides is used to characterize the phenotype 1226 as above.

[0416] As noted, in embodiment of FIG. 12C, the pool of oligonucleotides 1219 is directly contacted with a biological sample that comprises or is expected to comprise microvesicles. Microvesicles are thereafter isolated from the sample and the mixture is washed to remove unbound oligonucleotides and the remaining oligonucleotides are disassociated and collected 1224. The following steps are performed as above. As an example of this alternate configuration, a biological sample, e.g., a blood, serum or plasma sample, is directly contacted with the pool of oligonucleotides. Microvesicles are then isolated by various techniques disclosed herein, including without limitation ultracentrifugation, ultrafiltration, flow cytometry, affinity isolation, polymer precipitation, chromatography, various combinations thereof, or the like. Remaining oligonucleotides are then identified, e.g., by sequencing, hybridization or amplification.

[0417] In a related aspect, the invention provides a composition of matter comprising a plurality of oligonucleotides that can be used to carry out the methods comprising use of an oligonucleotide pool to characterize a phenotype. The plurality of oligonucleotides can comprise any of those described herein.

[0418] In a related aspect, the invention provides a method of performing high-throughput sequencing comprising: performing at least one (i) negative selection or (ii) one positive selection of a plurality of oligonucleotides with a microvesicle sample; obtaining a set of oligonucleotides to provide a negative binder subset or positive binder subset of the plurality of oligonucleotides, wherein the negative binder subset of the plurality of oligonucleotides does not bind the microvesicle sample and wherein the positive binder subset of the plurality of oligonucleotides does bind the microvesicle sample; contacting the negative binder subset or positive binder subset with a test sample; eluting oligonucleotides that bound to the test sample to provide a plurality of eluate oligonucleotides; and performing high-throughput sequencing of the plurality of eluate oligonucleotides to identify sequence and/or copy number of the members of the plurality of eluate oligonucleotides. Negative and positive selection of the plurality of oligonucleotides using microvesicle sample can be performed as disclosed herein. The oligonucleotide profile revealed by the sequence and/or copy number of the members of the plurality of eluate oligonucleotides can be used to characterize a phenotype of the test sample as described herein.

[0419] In a similar aspect, the invention provides a method for identifying oligonucleotides specific for a test sample. The method comprises: (a) enriching a plurality of oligonucleotides for a sample to provide a set of oligonucleotides predetermined to form a complex with a target sample; (b) contacting the plurality in (a) with a test sample to allow formation of complexes of oligonucleotides with test sample; (c) recovering oligonucleotides that formed complexes in (b) to provide a recovered subset of oligonucleotides; and (d) profiling the recovered subset of oligonucleotides by high-throughput sequencing or hybridization, thereby identifying oligonucleotides specific for a test sample. The test sample may comprise a plurality of microvesicles. The oligonucleotides may comprise RNA, DNA or both. In some embodiment, the method further comprises performing informatics analysis to identify a subset of oligonucleotides comprising sequence identity of at least 50%, 55%, 60%, 65%, 70%, 75%, 80%, 85%, 90%, 91%, 92%, 93%, 94%, 95%, 96%, 97%, 98%, or at least 99% to the oligonucleotides predetermined to form a complex with the target sample.

[0420] One of skill will appreciate that the method can be used to identify any appropriate target, including those not associated with a microvesicle. The target can be any useful target, including without limitation a cell, an organelle, a protein complex, a lipoprotein, a carbohydrate, a microvesicle, a virus, a membrane fragment, a small molecule, a heavy metal, a toxin, a drug, a nucleic acid (including without limitation microRNA (miR) and messenger RNA (mRNA)), a protein-nucleic acid complex, and various combinations, fragments and/or complexes of any of these. The target can, e.g., comprise a mixture of microvesicles and non-microvesicle entities.

[0421] In an aspect, the invention also provides a method comprising contacting an oligonucleotide or plurality of oligonucleotides with a sample and detecting the presence or level of binding of the oligonucleotide or plurality of oligonucleotides to a target in the sample, wherein the oligonucleotide or plurality of oligonucleotides can be those provided by the invention above. The sample may comprise a biological sample, an organic sample, an inorganic sample, a tissue, a cell culture, a bodily fluid, blood, serum, a cell, a microvesicle, a protein complex, a lipid complex, a carbohydrate, or any combination, fraction or variation thereof. The target may comprise a cell, an organelle, a protein complex, a lipoprotein, a carbohydrate, a microvesicle, a membrane fragment, a small molecule, a heavy metal, a toxin, or a drug.

[0422] In a related aspect, the invention provides a method comprising: a) contacting a biological sample comprising microvesicles with an oligonucleotide probe library, wherein optionally the oligonucleotide probe library comprises an oligonucleotide or plurality of oligonucleotides those provided by the invention above; b) identifying oligonucleotides bound to at least a portion of the microvesicles; and c) characterizing the sample based on a profile of the identified oligonucleotides.

[0423] In another aspect, the invention provides a method comprising: a) contacting a sample with an oligonucleotide probe library comprising at least 10⁶, 10⁷, 10⁸, 10⁹, 10¹⁰, 10¹¹, 10¹², 10¹³, 10¹⁴, 10¹⁵, 10¹⁶, 10¹⁷, or at least 10¹⁸ different oligonucleotide sequences oligonucleotides to form a mixture in solution, wherein the oligonucleotides are capable of binding a plurality of entities in the sample to form complexes, wherein optionally the oligonucleotide probe library comprises an oligonucleotide or plurality of oligonucleotides as provided by the invention above; b) partitioning the complexes formed in step (a) from the mixture; and c) detecting oligonucleotides present in the complexes partitioned in step (b) to identify an oligonucleotide profile for the sample. In an embodiment, the detecting step comprises performing sequencing of all or some of the oligonucleotides in the complexes, amplification of all or some of the oligonucleotides in the complexes, and/or hybridization of all or some of the oligonucleotides in the complexes to an array. The array can be any useful array, such as a planar or particle-based array.

[0424] In still another aspect, the invention provides a method for generating an enriched oligonucleotide probe library comprising: a) contacting a first oligonucleotide library with a biological test sample and a biological control sample, wherein complexes are formed between biological entities present in the biological samples and a plurality of oligonucleotides present in the first oligonucleotide library; b) partitioning the complexes formed in step (a) and isolating the oligonucleotides in the complexes to produce a subset of oligonucleotides for each of the biological test sample and biological control sample; c) contacting the subsets of oligonucleotides in (b) with the biological test sample and biological control sample wherein complexes are formed between biological entities present in the biological samples and a second plurality of oligonucleotides present in the subsets of oligonucleotides to generate a second subset group of oligonucleotides; and d) optionally repeating steps b)-c), one, two, three or more times to produce a respective third, fourth, fifth or more subset group of oligonucleotides, thereby producing the enriched oligonucleotide probe library. In a related aspect, the invention provides a plurality of oligonucleotides comprising at least 2, 3, 4, 5, 6, 7, 8, 9, 10, 11, 12, 13, 14, 15, 16, 17, 18, 19, 20, 25, 30, 40, 45, 50, 55, 60, 65, 70, 75, 80, 85, 90, 95, 100, 125, 150, 175, 200, 300, 400, 500, 600, 700, 800, 900, 1000, 2000, 3000, 4000, 5000, 6000, 7000, 8000, 9000, 10000, 20000, 30000, 40000, 50000, 60000, 70000, 80000, 90000, 100000, 200000, 300000, 400000, or 500000 different oligonucleotide sequences, wherein the plurality results from the method in this paragraph, wherein the library is capable of distinguishing a first phenotype from a second phenotype. In some embodiments, the first phenotype comprises a disease or disorder and the second phenotype comprises a healthy state; or wherein the first phenotype comprises a disease or disorder and the second phenotype comprises a different disease or disorder; or wherein the first phenotype comprises a stage or progression of a disease or disorder and the second phenotype comprises a different stage or progression of the same disease or disorder; or wherein the first phenotype comprises a positive response to a therapy and the second phenotype comprises a negative response to the same therapy.

[0425] In yet another aspect, the invention provides a method of characterizing a disease or disorder, comprising: a) contacting a biological test sample with the oligonucleotide or plurality of oligonucleotides provided by the invention; b) detecting a presence or level of complexes formed in step (a) between the oligonucleotide or plurality of oligonucleotides provided by the invention and a target in the biological test sample; and c) comparing the presence or level detected in step (b) to a reference level from a biological control sample, thereby characterizing the disease or disorder. The step of detecting may comprise performing sequencing of all or some of the oligonucleotides in the complexes, amplification of all or some of the oligonucleotides in the complexes, and/or hybridization of all or some of the oligonucleotides in the complexes to an array. The sequencing may be high-throughput or next generation sequencing.

[0426] In the methods of the invention, the biological test sample and biological control sample may each comprise a tissue sample, a cell culture, or a biological fluid. In some embodiments, the biological fluid comprises a bodily fluid. Useful bodily fluids within the method of the invention comprise peripheral blood, sera, plasma, ascites, urine, cerebrospinal fluid (CSF), sputum, saliva, bone marrow, synovial fluid, aqueous humor, amniotic fluid, cerumen, breast milk, broncheoalveolar lavage fluid, semen, prostatic fluid, cowper's fluid or pre-ejaculatory fluid, female ejaculate, sweat, fecal matter, hair, tears, cyst fluid, pleural and peritoneal fluid, pericardial fluid, lymph, chyme, chyle, bile, interstitial fluid, menses, pus, sebum, vomit, vaginal secretions, mucosal secretion, stool water, pancreatic juice, lavage fluids from sinus cavities, bronchopulmonary aspirates, blastocyl cavity fluid, or umbilical cord blood. In some preferred embodiments, the bodily fluid comprises blood, serum or plasma. The biological fluid may comprise microvesicles. In such case, the complexes may be formed between the oligonucleotide or plurality of oligonucleotides and at least one of the microvesicles.

[0427] The biological test sample and biological control sample may further comprise isolated microvesicles, wherein optionally the microvesicles are isolated using at least one of chromatography, filtration, ultrafiltration, centrifugation, ultracentrifugation, flow cytometry, affinity capture (e.g., to a planar surface, column or bead), polymer precipitation, and using microfluidics. The vesicles can also be isolated after contact with the oligonucleotide or plurality of oligonucleotides.

[0428] In various embodiments of the methods of the invention, the oligonucleotide or plurality of oligonucleotides binds a polypeptide or fragment thereof. The polypeptide or fragment thereof can be soluble or membrane bound, wherein optionally the membrane comprises a microvesicle membrane. The membrane could also be from a cell or a fragment of a cell of vesicle. In some embodiments, the polypeptide or fragment thereof comprises a biomarker in Table 3, Table 4 of International Patent Application PCT/US2016/040157, filed Jun. 29, 2016, and published as WO2017004243 on Jan. 5, 2017, or any one of Tables 10-17 or. For example, the polypeptide or fragment thereof could be a general vesicle marker such as in Table 3 or a tissue-related or disease-related marker such as in Table 4 of International Patent Application PCT/US2016/040157, or a vesicle associated biomarker provided in any one of Tables 10-17. The oligonucleotide or plurality of oligonucleotides may bind a microvesicle surface antigen in the biological sample. For example, the oligonucleotide or plurality of oligonucleotides can be enriched from a naïve library against microvesicles.

[0429] As noted above, the microvesicles may be isolated in whole or in part using polymer precipitation. In an embodiment, the polymer comprises polyethylene glycol (PEG). Any appropriate form of PEG may be used. For example, the PEG may be PEG 8000. The PEG may be used at any appropriate concentration. For example, the PEG can be used at a concentration of 1%, 2%, 3%, 4%, 5%, 6%, 7%, 8%, 9%, 10%, 11%, 12%, 13%, 14% or 15% to isolate the microvesicles. In some embodiments, the PEG is used at a concentration of 6%.

[0430] The invention provides oligonucleotide probes that can be used to carry out the methods herein. See, e.g., Examples 18-21. In an aspect, the invention provides an oligonucleotide comprising a sequence according to any one of SEQ ID NOs 137-969 and 1072-4150. In a related aspect, the invention provides an oligonucleotide comprising a sequence according to any one of the SEQ ID NOs in Table 19. In another related aspect, the invention provides an oligonucleotide comprising a sequence according to any one of the SEQ ID NOs in the row “2000v1” in Table 22. In still another related aspect, the invention provides an oligonucleotide comprising a sequence according to any one of the SEQ ID NOs in the row “2000v2” in Table 22. In yet another related aspect, the invention provides an oligonucleotide comprising a sequence according to any one of the SEQ ID NOs in the row “Common” in Table 22.

[0431] The oligonucleotides of the invention can comprise flanking regions for various purposes, including without limitation amplification, capture, conjugation or spacing. For example, the invention provides an oligonucleotide comprising a sequence according to any one of the SEQ ID NOs above and further having a 5′ region with sequence 5′-CTAGCATGACTGCAGTACGT (SEQ ID NO. 131) and/or a 3′ region with sequence 5′-CTGTCTCTTATACACATCTGACGCTGCCGACGA (SEQ ID NO. 132).

[0432] The invention further provides oligonucleotides homologous to the SEQ ID NOs above. For example, the invention provides an oligonucleotide comprising a nucleic acid sequence or a portion thereof that is at least 50, 55, 60, 65, 70, 75, 80, 85, 90, 95, 96, 97, 98, 99 or 100 percent homologous to an oligonucleotide sequence of any one of the SEQ ID NOs above. The homologous sequences may comprise similar properties to the listed sequences, such as similar binding properties.

[0433] In an aspect, the invention provides a plurality of oligonucleotides comprising at least 1, 2, 3, 4, 5, 6, 7, 8, 9, 10, 11, 12, 13, 14, 15, 16, 17, 18, 19, 20, 25, 30, 40, 45, 50, 55, 60, 65, 70, 75, 80, 85, 90, 95, 100, 125, 150, 175, 200, 300, 400, 500, 600, 700, 800, 900, 1000, 2000, 3000, 4000, 5000, 6000, 7000, 8000, 9000, or at least 10000 different oligonucleotide sequences as described in the paragraphs above. For example, the invention provides a plurality of oligonucleotides comprising member sequences having at least 1, 2, 3, 4, 5, 6, 7, 8, 9, 10, 11, 12, 13, 14, 15, 16, 17, 18, 19, 20, 25, 30, 40, 45, 50, 55, 60, 65, 70, 75, 80, 85, 90, 95, 100, 125, 150, 175, 200, 300, 400, 500, 600, 700, 800, 900, 1000, 1500, 2000, 2500, 3000, 3500, 4000, or all variable regions according to SEQ ID NOs 137-969 and 1072-4150.

[0434] The plurality of oligonucleotides can comprise at least 1, 2, 3, 4, 5, 6, 7, 8, 9, 10, 11, 12, 13, 14, 15, 16, 17, 18, 19, 20, 25, 30, 40, 45, 50, 55, 60, 65, 70, 75, or all SEQ ID NOs listed in Table 19. In an embodiment, the plurality of oligonucleotides comprises at least the first 1, 2, 3, 4, 5, 6, 7, 8, 9, 10, 11, 12, 13, 14, 15, 16, 17, 18, 19, 20, 25, 30, 40, 45, 50, 55, 60, 65, 70, 75, or SEQ ID NOs listed in Table 19.

[0435] The plurality of oligonucleotides can also comprise at least 1, 2, 3, 4, 5, 6, 7, 8, 9, 10, 11, 12, 13, 14, 15, 16, 17, 18, 19, 20, 25, 30, 40, 45, 50, 55, 60, 65, 70, 75, 80, 85, 90, 95, 100, 125, 150, 175, 200, 225, 250, 275, 300, or all SEQ ID NOs listed in row “2000v1” of Table 22. In an embodiment, the plurality of oligonucleotides comprises at least the first 1, 2, 3, 4, 5, 6, 7, 8, 9, 10, 11, 12, 13, 14, 15, 16, 17, 18, 19, 20, 25, 30, 40, 45, 50, 55, 60, 65, 70, 75, 80, 85, 90, 95, 100, 125, 150, 175, 200, 225, 250, 275, 300, or all SEQ ID NOs listed in row “2000v1” of Table 22.

[0436] The plurality of oligonucleotides can comprise at least 1, 2, 3, 4, 5, 6, 7, 8, 9, 10, 11, 12, 13, 14, 15, 16, 17, 18, 19, 20, 25, 30, 40, 45, 50, 55, 60, 65, 70, 75, 80, 85, 90, 95, 100, 105, 110, 115, 120, 125, 130, 135, 140, 145 or all SEQ ID NOs listed in row “2000v2” of Table 22. In an embodiment, the plurality of oligonucleotides comprises at least the first 1, 2, 3, 4, 5, 6, 7, 8, 9, 10, 11, 12, 13, 14, 15, 16, 17, 18, 19, 20, 25, 30, 40, 45, 50, 55, 60, 65, 70, 75, 80, 85, 90, 95, 100, 105, 110, 115, 120, 125, 130, 135, 140, 145 or all SEQ ID NOs listed in row “2000v2” of Table 22.

[0437] The plurality of oligonucleotides can also comprise at least 1, 2, 3, 4, 5, 6, 7, 8, 9, 10, 11, 12, 13, 14, 15, 16, 17 or all variable regions listed in row “Common” of Table 22. In an embodiment, the plurality of oligonucleotides comprises at least the first 1, 2, 3, 4, 5, 6, 7, 8, 9, 10, 11, 12, 13, 14, 15, 16, 17 or all SEQ ID NOs listed in row “Common” of Table 22.

[0438] The oligonucleotide or at least one member of the plurality of oligonucleotides can have least one functional modification selected from the group consisting of DNA, RNA, biotinylation, a non-naturally occurring nucleotides, a deletion, an insertion, an addition, and a chemical modification. Such modifications may provide additional or altered functions to the oligonucleotides, including without limitation capture, detection, stability, or binding properties.

[0439] Such oligonucleotides and plurality of oligonucleotides (pools) can be used to characterize a phenotype as described herein. In an aspect, the invention provides a method of characterizing a phenotype in a sample comprising: (a) contacting the sample with at least one oligonucleotide or plurality of oligonucleotides provided by the invention (see above); and (b) identifying a presence or level of a complex formed between the at least one oligonucleotide or plurality of oligonucleotides and the sample, wherein the presence or level is used to characterize the phenotype. Any useful technique for identifying can be used according to the invention. In various embodiments, the identifying comprises sequencing, amplification, hybridization, gel electrophoresis or chromatography. In an embodiment, identifying by hybridization comprises contacting the sample with at least one labeled probe that is configured to hybridize with at least one oligonucleotide. The at least one labeled probe can be directly or indirectly attached to a label. Any useful label can be used, including without limitation a fluorescent or magnetic label. In another embodiment, identifying by sequencing comprises next generation sequencing, dye termination sequencing, and/or pyrosequencing.

[0440] In the methods of the invention, the complex formed between the at least one oligonucleotide or the plurality of oligonucleotides and the sample can be a complex formed between a microvesicle population in the sample and the at least one oligonucleotide or plurality of oligonucleotides. The microvesicle population can be isolated in whole or in part from other constituents in the sample before of after the contacting. In embodiments, the isolating uses affinity purification, filtration, polymer precipitation, PEG precipitation, ultracentrifugation, a molecular crowding reagent, affinity isolation, affinity selection, or any combination thereof.

[0441] In the methods of the invention, the phenotype can be any detectable phenotype. In some embodiments, the phenotype comprises a disease or disorder. In such cases, the characterizing can be a diagnosis, prognosis and/or theranosis for the disease or disorder. The theranosis can be any type of therapy-related such as described herein. The theranosis includes without limitation predicting a treatment efficacy or lack thereof, or monitoring a treatment efficacy.

[0442] The characterizing step of the methods of the invention may entail comparing the presence or level to a reference. Any useful reference can be used. In an embodiment wherein the phenotype comprises a disease or disorder, the reference can be the presence or level determined in a sample from an individual without a disease or disorder, or from an individual with a different state of the disease or disorder. In some embodiments, the comparison to the reference of at least one oligonucleotide comprising a sequence having a SEQ ID NO provided above indicates that the sample comprises a cancer sample or a non-cancer/normal sample.

[0443] The disease or disorder detected by the oligonucleotide, plurality of oligonucleotides, or methods provided here may comprise any appropriate disease or disorder of interest, including without limitation Breast Cancer, Alzheimer's disease, bronchial asthma, Transitional cell carcinoma of the bladder, Giant cellular osteoblastoclastoma, Brain Tumor, Colorectal adenocarcinoma, Chronic obstructive pulmonary disease (COPD), Squamous cell carcinoma of the cervix, acute myocardial infarction (AMI)/acute heart failure, Chron's Disease, diabetes mellitus type II, Esophageal carcinoma, Squamous cell carcinoma of the larynx, Acute and chronic leukemia of the bone marrow, Lung carcinoma, Malignant lymphoma, Multiple Sclerosis, Ovarian carcinoma, Parkinson disease, Prostate adenocarcinoma, psoriasis, Rheumatoid Arthritis, Renal cell carcinoma, Squamous cell carcinoma of skin, Adenocarcinoma of the stomach, carcinoma of the thyroid gland, Testicular cancer, ulcerative colitis, or Uterine adenocarcinoma.

[0444] In some embodiments, the disease or disorder comprises a cancer, a premalignant condition, an inflammatory disease, an immune disease, an autoimmune disease or disorder, a cardiovascular disease or disorder, neurological disease or disorder, infectious disease or pain. The cancer can include without limitation one of acute lymphoblastic leukemia; acute myeloid leukemia; adrenocortical carcinoma; AIDS-related cancers; AIDS-related lymphoma; anal cancer; appendix cancer; astrocytomas; atypical teratoid/rhabdoid tumor; basal cell carcinoma; bladder cancer; brain stem glioma; brain tumor (including brain stem glioma, central nervous system atypical teratoid/rhabdoid tumor, central nervous system embryonal tumors, astrocytomas, craniopharyngioma, ependymoblastoma, ependymoma, medulloblastoma, medulloepithelioma, pineal parenchymal tumors of intermediate differentiation, supratentorial primitive neuroectodermal tumors and pineoblastoma); breast cancer; bronchial tumors; Burkitt lymphoma; cancer of unknown primary site; carcinoid tumor; carcinoma of unknown primary site; central nervous system atypical teratoid/rhabdoid tumor; central nervous system embryonal tumors; cervical cancer; childhood cancers; chordoma; chronic lymphocytic leukemia; chronic myelogenous leukemia; chronic myeloproliferative disorders; colon cancer; colorectal cancer; craniopharyngioma; cutaneous T-cell lymphoma; endocrine pancreas islet cell tumors; endometrial cancer; ependymoblastoma; ependymoma; esophageal cancer; esthesioneuroblastoma; Ewing sarcoma; extracranial germ cell tumor; extragonadal germ cell tumor; extrahepatic bile duct cancer; gallbladder cancer; gastric (stomach) cancer; gastrointestinal carcinoid tumor; gastrointestinal stromal cell tumor; gastrointestinal stromal tumor (GIST); gestational trophoblastic tumor; glioma; hairy cell leukemia; head and neck cancer; heart cancer; Hodgkin lymphoma; hypopharyngeal cancer; intraocular melanoma; islet cell tumors; Kaposi sarcoma; kidney cancer; Langerhans cell histiocytosis; laryngeal cancer; lip cancer; liver cancer; lung cancer; malignant fibrous histiocytoma bone cancer; medulloblastoma; medulloepithelioma; melanoma; Merkel cell carcinoma; Merkel cell skin carcinoma; mesothelioma; metastatic squamous neck cancer with occult primary; mouth cancer; multiple endocrine neoplasia syndromes; multiple myeloma; multiple myeloma/plasma cell neoplasm; mycosis fungoides; myelodysplastic syndromes; myeloproliferative neoplasms; nasal cavity cancer; nasopharyngeal cancer; neuroblastoma; Non-Hodgkin lymphoma; nonmelanoma skin cancer; non-small cell lung cancer; oral cancer; oral cavity cancer; oropharyngeal cancer; osteosarcoma; other brain and spinal cord tumors; ovarian cancer; ovarian epithelial cancer; ovarian germ cell tumor; ovarian low malignant potential tumor; pancreatic cancer; papillomatosis; paranasal sinus cancer; parathyroid cancer; pelvic cancer; penile cancer; pharyngeal cancer; pineal parenchymal tumors of intermediate differentiation; pineoblastoma; pituitary tumor; plasma cell neoplasm/multiple myeloma; pleuropulmonary blastoma; primary central nervous system (CNS) lymphoma; primary hepatocellular liver cancer; prostate cancer; rectal cancer; renal cancer; renal cell (kidney) cancer; renal cell cancer; respiratory tract cancer; retinoblastoma; rhabdomyosarcoma; salivary gland cancer; Sezary syndrome; small cell lung cancer; small intestine cancer; soft tissue sarcoma; squamous cell carcinoma; squamous neck cancer; stomach (gastric) cancer; supratentorial primitive neuroectodermal tumors; T-cell lymphoma; testicular cancer; throat cancer; thymic carcinoma; thymoma; thyroid cancer; transitional cell cancer; transitional cell cancer of the renal pelvis and ureter; trophoblastic tumor; ureter cancer; urethral cancer; uterine cancer; uterine sarcoma; vaginal cancer; vulvar cancer; Waldenstrom macroglobulinemia; or Wilm's tumor. The premalignant condition can include without limitation Barrett's Esophagus. The autoimmune disease can include without limitation one of inflammatory bowel disease (IBD), Crohn's disease (CD), ulcerative colitis (UC), pelvic inflammation, vasculitis, psoriasis, diabetes, autoimmune hepatitis, multiple sclerosis, myasthenia gravis, Type I diabetes, rheumatoid arthritis, psoriasis, systemic lupus erythematosis (SLE), Hashimoto's Thyroiditis, Grave's disease, Ankylosing Spondylitis Sjogrens Disease, CREST syndrome, Scleroderma, Rheumatic Disease, organ rejection, Primary Sclerosing Cholangitis, or sepsis. The cardiovascular disease can include without limitation one of atherosclerosis, congestive heart failure, vulnerable plaque, stroke, ischemia, high blood pressure, stenosis, vessel occlusion or a thrombotic event. The neurological disease can include without limitation one of Multiple Sclerosis (MS), Parkinson's Disease (PD), Alzheimer's Disease (AD), schizophrenia, bipolar disorder, depression, autism, Prion Disease, Pick's disease, dementia, Huntington disease (HD), Down's syndrome, cerebrovascular disease, Rasmussen's encephalitis, viral meningitis, neurospsychiatric systemic lupus erythematosus (NPSLE), amyotrophic lateral sclerosis, Creutzfeldt-Jacob disease, Gerstmann-Straussler-Scheinker disease, transmissible spongiform encephalopathy, ischemic reperfusion damage (e.g. stroke), brain trauma, microbial infection, or chronic fatigue syndrome. The pain can include without limitation one of fibromyalgia, chronic neuropathic pain, or peripheral neuropathic pain. The infectious disease can include without limitation one of a bacterial infection, viral infection, yeast infection, Whipple's Disease, Prion Disease, cirrhosis, methicillin-resistant Staphylococcus aureus, HIV, HCV, hepatitis, syphilis, meningitis, malaria, tuberculosis, or influenza. One of skill will appreciate that the oligonucleotide or plurality of oligonucleotides or methods of the invention can be used to assess any number of these or other related diseases and disorders.

[0445] In some embodiments of the invention, the oligonucleotide or plurality of oligonucleotides and methods of use thereof are useful for characterizing certain diseases or disease states. As desired, a pool of oligonucleotides useful for characterizing various diseases is assembled to create a master pool that can be used to probe useful for characterizing the various diseases. One of skill will also appreciate that pools of oligonucleotides useful for characterizing specific diseases or disorders can be created as well. The sequences provided herein can also be modified as desired so long as the functional aspects are still maintained (e.g., binding to various targets or ability to characterize a phenotype). For example, the oligonucleotides may comprise DNA or RNA, incorporate various non-natural nucleotides, incorporate other chemical modifications, or comprise various deletions or insertions. Such modifications may facilitate synthesis, stability, delivery, labeling, etc, or may have little to no effect in practice. In some cases, some nucleotides in an oligonucleotide may be substituted while maintaining functional aspects of the oligonucleotide. Similarly, 5′ and 3′ flanking regions may be substituted. In still other cases, only a portion of an oligonucleotide may be determined to direct its functionality such that other portions can be deleted or substituted. Numerous techniques to synthesize and modify nucleotides and polynucleotides are disclosed herein or are known in the art.

[0446] In an aspect, the invention provides a kit comprising a reagent for carrying out the methods of the invention provided herein. In a similar aspect, the invention contemplates use of a reagent for carrying out the methods of the invention provided herein. In embodiments, the reagent comprises an oligonucleotide or plurality of oligonucleotides. The oligonucleotide or plurality of oligonucleotides can be those provided herein. The reagent may comprise various other useful components including without limitation microRNA (miR) and messenger RNA (mRNA)), a protein-nucleic acid complex, and various combinations, fragments and/or complexes of any of these. Theone or more of: a) a reagent configured to isolate a microvesicle, optionally wherein the at least one reagent configured to isolate a microvesicle comprises a binding agent to a microvesicle antigen, a column, a substrate, a filtration unit, a polymer, polyethylene glycol, PEG4000, PEG8000, a particle or a bead; b) at least one oligonucleotide configured to act as a primer or probe in order to amplify, sequence, hybridize or detect the oligonucleotide or plurality of oligonucleotides; and c) a reagent configured to remove one or more abundant protein from a sample, wherein optionally the one or more abundant protein comprises at least one of albumin, immunoglobulin, fibrinogen and fibrin.

[0447] Recovery of Oligonucleotide Probes Post-Probing

[0448] As described herein, the oligonucleotide probes of the invention can be used to probe a sample in order to characterize a phenotype. The methods may entail recovering the oligonucleotide probes that bound various biological entities in the sample in order to identify the bound probes. In an aspect, the invention provides a method of detecting at least one oligonucleotide in a sample, comprising: (a) providing the at least one oligonucleotide comprising a capture moiety; (b) contacting the sample with the at least one oligonucleotide provided in (a); (c) capturing the at least one oligonucleotide that formed a complex with a component in the sample in (b); and (d) identifying a presence or level of the at least one oligonucleotide captured in (c), wherein optionally the presence or level is used to characterize a phenotype. See, e.g., Example 33 and FIGS. 17A-E of PCT/US2016/044595, filed Jul. 28, 2016. The at least one oligonucleotide may be captured to a substrate, including without limitation a bead or planar substrate. The capture moiety can be any useful capture moiety, including without limitation a biotin moiety. The capture moiety can be cleavable, e.g., photocleavable or chemically cleavable. In an embodiment, the at least one oligonucleotide is captured to a substrate coupled to avidin or streptavidin. Such configuration is particularly useful when the capture moiety comprises a biotin moiety. In some embodiments, the captured at least one oligonucleotide is released from the substrate by irradiation prior to the identifying. Any useful irradiation, e.g., ultra violet (UV) light may be used. Any useful technique for identifying can be used according to the invention. In various embodiments, the identifying comprises sequencing, amplification, hybridization, gel electrophoresis or chromatography. In an embodiment, identifying by hybridization comprises contacting the sample with at least one labeled probe that is configured to hybridize with at least one oligonucleotide. The at least one labeled probe can be directly or indirectly attached to a label. Any useful label can be used, including without limitation a fluorescent or magnetic label. In another embodiment, identifying by sequencing comprises next generation sequencing, dye termination sequencing, and/or pyrosequencing. The at least one oligonucleotide can be an oligonucleotide or plurality of oligonucleotides provided by the invention. See e.g., the oligonucleotides and plurality of oligonucleotides described above.

[0449] Single Strand DNA (ssDNA) Library Preparation

[0450] In an embodiment, the invention provides a nucleic acid molecule comprising a 5′ leader region which is 5′ of a variable region, which is 5′ of a tail region, wherein the leader region comprises a lengthener region, a terminator region and a forward primer region, and the tail region comprises a reverse primer region. The nucleic acid molecule may be used for asymmetric or unequal length PCR applications as desired, e.g., to recover ssDNA. See, e.g., Example 34 and FIGS. 18A-C of PCT/US2016/044595, filed Jul. 28, 2016. The lengthener region can be any desired length. In some embodiments, the lengthener region comprises at least 10, 11, 12, 13, 14, 15, 16, 17, 18, 19, 20, 21, 22, 23, 24, 25, 26, 27, 28, 29, 30, 31, 32, 33, 34, 35, 36, 37, 38, 39, 30, 41, 42, 43, 44, 45, 46, 47, 48, 49, or 50 nucleotides. The lengthener region may comprise a poly-A sequence. Similarly, the terminator region can be any desired length. In some embodiments, the terminator region comprises at least 3, 4, 5, 6, 7, 8, 9, 10, 11, 12, 13, 14, 15, 16, 17, 18, 19, 20, 21, 22, 23, 24, 25, 26, 27, 28, 29, 30, 31, 32, 33, 34, 35, 36, 37, 38, 39, 30, 41, 42, 43, 44, 45, 46, 47, 48, 49, or 50 nucleotides. The terminator region may comprise a non-nucleotide terminator. For example, the non-nucleotide terminator can be a polymer such as triethylene glycol or the like. The forward primer region can be any desired length. In some embodiments, the forward primer region comprises at least 10, 11, 12, 13, 14, 15, 16, 17, 18, 19, 20, 21, 22, 23, 24, 25, 26, 27, 28, 29, 30, 31, 32, 33, 34, 35, 36, 37, 38, 39, 30, 41, 42, 43, 44, 45, 46, 47, 48, 49, or 50 nucleotides. The variable region can be any desired length. In some embodiments, the variable region comprises at least 10, 11, 12, 13, 14, 15, 16, 17, 18, 19, 20, 21, 22, 23, 24, 25, 26, 27, 28, 29, 30, 31, 32, 33, 34, 35, 36, 37, 38, 39, 30, 41, 42, 43, 44, 45, 46, 47, 48, 49, or 50 nucleotides. In some embodiments, the variable region binds a target molecule or complex through non-Watson-Crick base pairing. For example, the variable region may act as an aptamer and bind proteins or other entities. Finally, the reverse primer region can be any desired length. In some embodiments, the reverse primer region comprises at least 10, 11, 12, 13, 14, 15, 16, 17, 18, 19, 20, 21, 22, 23, 24, 25, 26, 27, 28, 29, 30, 31, 32, 33, 34, 35, 36, 37, 38, 39, 30, 41, 42, 43, 44, 45, 46, 47, 48, 49, or 50 nucleotides.

[0451] In a related aspect, the invention provides a method of generating a single-stranded DNA (ssDNA) molecule comprising: a) providing a mixture comprising a nucleic acid molecule as described in the paragraph above, and forward and reverse primers configured to amplify the nucleic acid molecule from the forward primer region and reverse primer region, respectively; and b) performing asymmetric polymerase chain reaction (PCR) on the mixture in a) to favorably amplify the reverse strand of the nucleic acid molecule, wherein the forward and reverse primers in the mixture are at a ratio of at least about 1:5 (F/R) in favor of the reverse primers; thereby generating the ssDNA molecule. In an embodiment, the ratio is between about 1:20-1:50 (F/R) in favor of the reverse primers. For example, the ratio can be between about 1:37.5 (F/R) in favor of the reverse primers. The method may further comprise isolating the amplified reverse strand of the nucleic acid molecule on a native gel. The method may also further comprise: c) denaturing the amplified nucleic acid molecules from b); and d) isolating the denatured reverse strand of the nucleic acid molecules from c). In an embodiment, the denatured reverse strand of the nucleic acid molecules is isolated on a denaturing gel. The mixture in a) can comprise additional components as desired. For example, the mixture may further comprise at least one of an enrichment buffer, non-target molecules, proteins, microvesicles, and polyethyleve glycol.

[0452] In a related aspect, the invention provides a kit comprising a reagent for carrying out the methods herein. In still another related aspect, the invention provides for use of a reagent for carrying out the methods. In various embodiments, the reagent comprises at least one of a buffer, a nucleic acid molecule described above, and forward and/or reverse primers configured to amplify the nucleic acid molecule.

[0453] Detecting Watson-Crick Base Pairing with an Oligonucleotide Probe

[0454] The oligonucleotide probes provided by the invention can bind via non-Watson Crick base pairing. However, in some cases, the oligonucleotide probes provided by the invention can bind via Watson Crick base pairing. The oligonucleotide probe libraries of the invention, e.g., as described above, can query both types of binding events simultaneously. For example, some oligonucleotide probes may bind the microvesicle protein antigens in the classical aptamer sense, whereas other oligonucleotide probes may bind microvesicles via nucleic acids associated with the microvesicles, e.g., nucleic acid (including without limitation microRNA and mRNA) on the surface of the microvesicles or as payload.

[0455] Such surface bound nucleic acids can be associated with proteins. For example, they may comprise Argonaute-microRNA complexes. The argonaute protein can be Ago1, Ago2, Ago3 and/or Ago4.

[0456] In addition to the oligonucleotide probe library approach described herein which relies on determining a sequence of the oligonucleotides (e.g., via sequencing, hybridization or amplification), assays can also be designed to detect Watson Crick base pairing. In some embodiments, these approaches rely on Ago2-mediated cleavage wherein an Ago2-microRNA complex can be used to detected using oligonucleotide probes. These approaches can use oligonucleotide probes to detect Ago2-microRNA complexes, which may or may not be associated with microvesicles. The detection can be used to characterize a phenotype as described herein. Such detection can be used along side the sequencing identification methods described herein (e.g., via sequencing, hybridization or amplification). For further details, see PCT/US15/62184, filed Nov. 23, 2015, which application is incorporated by reference herein in its entirety.

### Therapeutics

[0457] As used herein “therapeutically effective amount” refers to an amount of a composition that relieves (to some extent, as judged by a skilled medical practitioner) one or more symptoms of the disease or condition in a mammal. Additionally, by “therapeutically effective amount” of a composition is meant an amount that returns to normal, either partially or completely, physiological or biochemical parameters associated with or causative of a disease or condition. A clinician skilled in the art can determine the therapeutically effective amount of a composition in order to treat or prevent a particular disease condition, or disorder when it is administered, such as intravenously, subcutaneously, intraperitoneally, orally, or through inhalation. The precise amount of the composition required to be therapeutically effective will depend upon numerous factors, e.g., such as the specific activity of the active agent, the delivery device employed, physical characteristics of the agent, purpose for the administration, in addition to many patient specific considerations. But a determination of a therapeutically effective amount is within the skill of an ordinarily skilled clinician upon the appreciation of the disclosure set forth herein.

[0458] The terms “treating,” “treatment,” “therapy,” and “therapeutic treatment” as used herein refer to curative therapy, prophylactic therapy, or preventative therapy. An example of “preventative therapy” is the prevention or lessening the chance of a targeted disease (e.g., cancer or other proliferative disease) or related condition thereto. Those in need of treatment include those already with the disease or condition as well as those prone to have the disease or condition to be prevented. The terms “treating,” “treatment,” “therapy,” and “therapeutic treatment” as used herein also describe the management and care of a mammal for the purpose of combating a disease, or related condition, and includes the administration of a composition to alleviate the symptoms, side effects, or other complications of the disease, condition. Therapeutic treatment for cancer includes, but is not limited to, surgery, chemotherapy, radiation therapy, gene therapy, and immunotherapy.

[0459] As used herein, the term “agent” or “drug” or “therapeutic agent” refers to a chemical compound, a mixture of chemical compounds, a biological macromolecule, or an extract made from biological materials such as bacteria, plants, fungi, or animal (particularly mammalian) cells or tissues that are suspected of having therapeutic properties. The agent or drug can be purified, substantially purified or partially purified. An “agent” according to the present invention, also includes a radiation therapy agent or a “chemotherapuetic agent.”

[0460] As used herein, the term “diagnostic agent” refers to any chemical used in the imaging of diseased tissue, such as, e.g., a tumor.

[0461] As used herein, the term “chemotherapuetic agent” refers to an agent with activity against cancer, neoplastic, and/or proliferative diseases, or that has ability to kill cancerous cells directly.

[0462] As used herein, “pharmaceutical formulations” include formulations for human and veterinary use with no significant adverse toxicological effect. “Pharmaceutically acceptable formulation” as used herein refers to a composition or formulation that allows for the effective distribution of the nucleic acid molecules of the instant invention in the physical location most suitable for their desired activity.

[0463] As used herein the term “pharmaceutically acceptable carrier” is intended to include any and all solvents, dispersion media, coatings, antibacterial and antifungal agents, isotonic and absorption delaying agents, and the like, compatible with pharmaceutical administration. The use of such media and agents for pharmaceutically active substances is well known in the art. Except insofar as any conventional media or agent is incompatible with the active compound, use thereof in the compositions is contemplated.

[0464] Aptamer-Toxin Conjugates as a Cancer Therapeutic

[0465] Previous work has developed the concept of antibody-toxin conjugates (“immunoconjugates”) as potential therapies for a range of indications, mostly directed at the treatment of cancer with a primary focus on hematological tumors. A variety of different payloads for targeted delivery have been tested in pre-clinical and clinical studies, including protein toxins, high potency small molecule cytotoxics, radioisotopes, and liposome-encapsulated drugs. While these efforts have successfully yielded three FDA-approved therapies for hematological tumors, immunoconjugates as a class (especially for solid tumors) have historically yielded disappointing results that have been attributable to multiple different properties of antibodies, including tendencies to develop neutralizing antibody responses to non-humanized antibodies, limited penetration in solid tumors, loss of target binding affinity as a result of toxin conjugation, and imbalances between antibody half-life and toxin conjugate half-life that limit the overall therapeutic index (reviewed by Reff and Heard, Critical Reviews in Oncology/Hematology, 40 (2001):25-35).

[0466] Aptamers are functionally similar to antibodies, except their absorption, distribution, metabolism, and excretion (“ADME”) properties are intrinsically different and they generally lack many of the immune effector functions generally associated with antibodies (e.g., antibody-dependent cellular cytotoxicity, complement-dependent cytotoxicity). In comparing many of the properties of aptamers and antibodies previously described, several factors suggest that toxin-delivery via aptamers offers several concrete advantages over delivery with antibodies, ultimately affording them better potential as therapeutics. Several examples of the advantages of toxin-delivery via aptamers over antibodies are as follows:

[0467] 1) Aptamer-toxin conjugates are entirely chemically synthesized. Chemical synthesis provides more control over the nature of the conjugate. For example, the stoichiometry (ratio of toxins per aptamer) and site of attachment can be precisely defined. Different linker chemistries can be readily tested. The reversibility of aptamer folding means that loss of activity during conjugation is unlikely and provides more flexibility in adjusting conjugation conditions to maximize yields.

[0468] 2) Smaller size allows better tumor penetration. Poor penetration of antibodies into solid tumors is often cited as a factor limiting the efficacy of conjugate approaches. See Colcher, D., Goel, A., Pavlinkova, G., Beresford, G., Booth, B., Batra, S. K. (1999) “Effects of genetic engineering on the pharmacokinetics of antibodies,” Q. J. Nucl. Med., 43: 132-139. Studies comparing the properties of unPEGylated anti-tenascin C aptamers with corresponding antibodies demonstrate efficient uptake into tumors (as defined by the tumor:blood ratio) and evidence that aptamer localized to the tumor is unexpectedly long-lived (t_{1/2}>12 hours) (Hicke, B. J., Stephens, A. W., “Escort aptamers: a delivery service for diagnosis and therapy”, J. Clin. Invest., 106:923-928 (2000)).

[0469] 3) Tunable P K. Aptamer half-life/metabolism can be easily tuned to match properties of payload, optimizing the ability to deliver toxin to the tumor while minimizing systemic exposure. Appropriate modifications to the aptamer backbone and addition of high molecular weight PEGs should make it possible to match the half-life of the aptamer to the intrinsic half-life of the conjugated toxin/linker, minimizing systemic exposure to non-functional toxin-bearing metabolites (expected if t_{1/2}(aptamer)<<t_{1/2}(toxin)) and reducing the likelihood that persisting unconjugated aptamer will functionally block uptake of conjugated aptamer (expected if t_{1/2}(aptamer)>>t_{1/2} (toxin)).

[0470] 4) Relatively low material requirements. It is likely that dosing levels will be limited by toxicity intrinsic to the cytotoxic payload. As such, a single course of treatment will likely entail relatively small (<100 mg) quantities of aptamer, reducing the likelihood that the cost of oligonucleotide synthesis will be a barrier for aptamer-based therapies.

[0471] 5) Parenteral administration is preferred for this indication. There will be no special need to develop alternative formulations to drive patient/physician acceptance.

[0472] The invention provides a pharmaceutical composition comprising a therapeutically effective amount of an aptamer provided by the invention or a salt thereof, and a pharmaceutically acceptable carrier or diluent. The invention also provides a pharmaceutical composition comprising a therapeutically effective amount of the aptamer or a salt thereof, and a pharmaceutically acceptable carrier or diluent. Relatedly, the invention provides a method of treating or ameliorating a disease or disorder, comprising administering the pharmaceutical composition to a subject in need thereof. Administering a therapeutically effective amount of the composition to the subject may result in: (a) an enhancement of the delivery of the active agent to a disease site relative to delivery of the active agent alone; or (b) an enhancement of microvesicles clearance resulting in a decrease of at least 10%, 20%, 30%, 40%, 50%, 60%, 70%, 80%, or 90% in a blood level of microvesicles targeted by the aptamer; or (c) an decrease in biological activity of microvesicles targeted by the aptamer of at least 10%, 20%, 30%, 40%, 50%, 60%, 70%, 80%, or 90%. In an embodiment, the biological activity of microvesicles comprises immune suppression or transfer of genetic information. The disease or disorder can include without limitation those disclosed herein. For example, the disease or disorder may comprise a neoplastic, proliferative, or inflammatory, metabolic, cardiovascular, or neurological disease or disorder. See, e.g., section “Phenotypes.”

[0473] Anti-Target and Multivalent Oligonucleotides

[0474] As noted above, the target of oligonucleotide probes can be identified. For example, when the target comprises a protein or protein complex (e.g., a nucleoprotein or lipoprotein), identifying the target may comprise use of mass spectrometry (MS), peptide mass fingerprinting (PMF; protein fingerprinting), sequencing, N-terminal amino acid analysis, C-terminal amino acid analysis, Edman degradation, chromatography, electrophoresis, two-dimensional gel electrophoresis (2D gel), antibody array, or immunoassay. Such approaches can be applied to identify a number of targets recognized by an oligonucleotide probe library. For example, an oligonucleotide probe library can be incubated with a sample of interest, bound members of the library captured, and the targets bound to the captured members identified. See Example 15 herein for an example of such target identification using mass spectrometry.

[0475] The oligonucleotide aptamers to the various targets can be used for multiple purposes. In some embodiments, the aptamers are used as therapeutic agents. Immunotherapeutic approaches using antibodies that recognize foreign/misfolded antigens (e.g., anti-CD20, anti-CD30, anti-CD33, anti-CD52, anti-EGFR, anti-nucleolin, anti-nucleophosmin, etc.) can selectively kill target cells via linked therapeutic agents or by stimulating the immune system through activation of cell-mediated cytotoxicity. Aptamers or oligonucleotides are an attractive immunotherapeutic alternative for various reasons such as low cost, small size, ease and speed of synthesis, stability and low immunogenicity. In an embodiment, immunotherapeutic agents are conjugated to disease specific target oligonucleotide or antibody (Ab) for targeted cell killing via recruitment of complement proteins and the downstream membrane attack complex. See, e.g., Zhou and Rossi, Cell-type-specific, Aptamer-functionalized Agents for Targeted Disease Therapy, Mol Ther Nucleic Acids. 2014 Jun. 17; 3:e169. doi: 10.1038/mtna.2014.21; Pei et al., Clinical applications of nucleic acid aptamers in cancer, Mol Clin Oncol. 2014 May; 2(3):341-348. Epub 2014 Feb. 10. This approach can be applied to target diseased host cells such as cancer cells, gram negative bacteria, viral and/or parasitic infections, and the like.

[0476] In some embodiments, the invention provides a multipartite construct comprising a binding agent specific to a biological target with another binding agent specific to immunomodulatory entity. Examples of such constructs are shown in FIG. 16A. In Design 1 in the figure, the horizontal line indicates an oligonucleotide construct, which construct comprises a 5′ primer 1601 (Primer 1), a variable region 1602 that can be an aptamer to a target of interest, a 3′ primer 1603 (Primer 2), and an immunomodulatory domain region (“IMD”) 1604. The complete Design 1 construct can be used to bring a target of interest in proximity with an immunomodulatory agent. The primers can be designed for any desired purpose, e.g., amplification, capture, modification, direct or indirect labeling, and the like. In some embodiments, the target of the variable region is a disease marker and thus the construct is targeted to a disease cell or microvesicle. The immunomodulatory domain region can act as an immune stimulator or suppressor. Any appropriate immune stimulator or suppressor can be used, e.g., a small molecule, antibody or an aptamer. Thus, the construct can modulate the immune response at a target of interest, e.g., at a cell or microvesicle carrying the target. The basic construct can be modified as desired. For example, Design 2 in FIG. 16A shows the construct carrying a linker 1605 between Primer 2 1603 and the IMD 1604. Such linkers are explained further below and can be inserted between any components of the construct as desired. Linkers can provide a desired space between the regions of the construct and can be manipulated to influence other properties such as stability. Design 3 in FIG. 16A shows another example wherein the IMD 1604 is an oligonucleotide and the variable region 1602 and IMD 1604 lie between the primers 1601 and 1603. One of skill will appreciate that one or more linker, such as 1605 of Design 2, can also be inserted into Design 3, e.g., between the variable region 1602 and IMD 1604. One of skill will further appreciate that the ordering of the oligonucleotide segments from 5′ to 3′ can be modified, e.g., reversed. As a concrete example which will be described further below, FIG. 16B illustrates Design 1 and Design 2 from FIG. 16A wherein the variable region comprises an anti-CD20 oligonucleotide 1611 and the IMD comprises an anti-C1q oligonucleotide 1612, e.g., an oligonucleotide provided herein. See, e.g., Example 22. This constructs of FIG. 16B can be used used to target a CD20+ cell population and stimulate C1q mediated cell killing.

[0477] As noted, the multipartite constructs may be synthesized and/or modified as desired. In some embodiments of the invention, the multipartite oligonucleotide construct is synthesized directly with or without a linker in between the oligonucleotide segments. See, e.g., FIG. 16A Design 3, which can be generated directly via amplification by Primer 1 1601 and Primer 2 1603. One or more linker can act as a spacer to create a desired spacing between the target of the variable region segment 1602 and the target of the IMD segment 1604. The spacing can be determined via computer modeling or via experimentation due to steric hindrance or other considerations. Following the example of FIG. 16B, the type and size of the linker may be dependent upon steric hindrance between the CD20 target protein and the C1q protein/MAC complex.

[0478] The multipartite constructs can be generated against any appropriate target. The targets can include without limitation diseased cells, cancer cells, circulating tumor cells (CTCs), immune cells (e.g., B-cells, T-cells, macrophages, dendritic cells), microvesicles, bacteria, viruses or other parasites. The target can be large biological complexes, e.g., protein complexes, ribonucleoprotein complexes, lipid complexes, or a combination thereof. It will be understood that the specific target of the multipartite constructs can be a certain member of the foregoing macromolecular targets. For example, consider that the desired target of the multipartite construct is a cell or microvesicle. In such case, the multipartite construct can be directed to a specific biomarker, e.g., a surface antigen, of the cell or microvesicle. As a non-limiting example, the target of interest can be B-cells and the specific target of the variable region of the multipartite construct can be CD20. CD20 is a cellular marker of B-cells targeted by the monoclonal antibodies (mAb) rituximab, obinutuzumab, ofatumumab, ibritumomab tiuxetan, and tositumomab, which are used as agents in the treatment of B-cell lymphomas and leukemias. As another non-limiting example, the target of interest can be cancer cells and the specific target of the variable region of the multipartite construct can be c-MET. MET is a membrane receptor that is essential for embryonic development and wound healing. Abnormal MET activation in cancer correlates with poor prognosis, where aberrantly active MET triggers tumor growth, formation of new blood vessels (angiogenesis), and cancer spread to other organs (metastasis). MET has been observed to be deregulated in many types of human malignancies, including cancers of kidney, liver, stomach, breast, and brain. See FIG. 16D for illustration (discussed further below). Other biomarkers can be used as the specific target as desired. For example, the biomarker can be selected from any of Tables 3, 10-17, 24, 29, 31, 32, 39-41 or 46-49 herein, or Table 4 of International Patent Application PCT/US2016/040157. See FIG. 16C, which illustrates a construct of the invention 1631 having a segment that recognizes a biomarker 1632 (“Marker of Interest”) on a cell or vesicle surface 1633 (“Membrane”), and another segment 1634 that attracts an immune response (“Complement”). The construct 1631 can be such as in FIGS. 16A-B or any other desired configuration. Binding of such a construct to a target can cause a complement cascade and induce apoptosis.

[0479] In some embodiments of the invention, the target biomarker is selected from the group consisting of CD19, CD20, CD21, CD22 (also known as LL2), CDIM, and Lym-1. The target biomarker can be a membrane associated protein. In embodiments, the membrane associated protein is selected from the group consisting of CD4, CD19, DC-SIGN/CD209, HIV envelope glycoprotein gp120, CCR5, EGFR/ErbB1, EGFR2/ErbB2/HER2, EGFR3/ErbB3, EGFR4/ErbB4, EGFRvIII, Transferrin Receptor, PSMA, VEGF, VEGF-2, CD25, CD11a, CD33, CD20, CD3, CD52, CEA, TAG-72, LDL receptor, insulin receptor, megalin receptor, LRP, mannose receptor, P63/CKAP4 receptor, arrestin, ASGP, CCK-B, HGFR, RON receptor, FGFR, ILR, AFP, CA125/MUC16, PDGFR, stem cell factor receptor, colony stimulating factor-1 receptor, integrins, TLR, BCR and BAFF-R. The target biomarker can also be a cellular receptor selected from the group consisting of: nucleolin, human epidermal growth factor receptor 2 (HER2), CD20, a transferrin receptor, an asialoglycoprotein receptor, a thyroid-stimulating hormone (TSH) receptor, a fibroblast growth factor (FGF) receptor, CD3, the interleukin 2 (IL-2) receptor, a growth hormone receptor, an insulin receptor, an acetylcholine receptor, an adrenergic receptor, a vascular endothelial growth factor (VEGF) receptor, a protein channel, cadherin, a desmosome, and a viral receptor. In various embodiments, the target biomarker is a cell surface molecule selected from the group consisting of IgM, IgD, IgG, IgA, IgE, CD19, CD20, CD21, CD22, CD24, CD40, CD72, CD79a, CD79b, CD1d, CD5, CD9, CD10, CD1d, CD23, CD27, CD38, CD48, CD80, CD86, CD138, CD148, and combinations thereof. The target biomarker can be a lymphocyte-directing target such as one or more T-cell receptor motifs, T-cell a chains, T-cell 13 chains, T-cell y chains, T-cell A chains, CCR7, CD3, CD4, CD5, CD7, CD8, CD11b, CD11c, CD16, CD19, CD20, CD21, CD22, CD25, CD28, CD34, CD35, CD40, CD45RA, CD45RO, CD52, CD56, CD62L, CD68, CD80, CD95, CD117, CD127, CD133, CD137 (4-1 BB), CD163, F4/80, IL-4Ra, Sca-1, CTLA-4, GITR, GARP, LAP, granzyme B, LFA-1, or transferrin receptor.

[0480] In some embodiments, the target biomarker comprises a growth factor, vascular endothelial growth factor (VEGF), TGF, TGFβ, PDGF, IGF, FGF, cytokine, lymphokine, hematopoietic factor, M-CSR, GM-CSF, TNF, interleukin, IL-1, IL-2, IL-3, IL-4, IL-5, IL-6, IL-7, IL-8, IL-9, IL-10, IL-11, IL-12, IL-13, IL-14, IL-15, IL-16, IL-17, IL18, IFN, TNF0, TNF1, TNF2, G-CSF, Meg-CSF, GM-CSF, thrombopoietin, stem cell factor, erythropoietin, hepatocyte growth factor/NK1, angiogenic factor, angiopoietin, Ang-1, Ang-2, Ang-4, Ang-Y, human angiopoietin-like polypeptide, angiogenin, morphogenic protein-1, bone morphogenic protein receptor, bone morphogenic protein receptor IA, bone morphogenic protein receptor IB, neurotrophic factor, chemotactic factor, CD proteins, CD3, CD4, CD8, CD19, CD20, erythropoietin, osteoinductive factors, immunotoxin, bone morphogenetic protein (BMP), interferon, interferon-alpha, interferon-beta, interferon-gamma, colony stimulating factor (CSF), M-CSF, GM-CSF, G-CSF, superoxide dismutase, T-cell receptor; surface membrane protein, decay accelerating factor, viral antigen, portion of the AIDS envelope, transport protein, homing receptor, addressin, regulatory protein, integrin, CD11a, CD11b, CD11c, CD18, ICAM, VLA-4, VCAM, tumor associated antigen, HER2, HER3, HER4, nucleophosmin, a heterogeneous nuclear ribonucleoproteins (hnRNPs), fibrillarin; or fragments or variants thereof.

[0481] In still other embodiments, the target biomarker is selected from the group consisting of epidermal growth factor receptor, transferrin receptor, platelet-derived growth factor receptor, Erb-B2, CD 19, CD20, CD45, CD52, Ep-CAM, alpha ([alpha])-fetoprotein, carcinoembryonic antigen peptide-1, caspase-8, CDC27, CDK4, carcino-embryonic antigen, calcium-activated chloride channel-2, cyclophilin B, differentiation antigen melanoma, elongation factor 2, Ephrin type-A receptor 2, 3, Fibroblast growth factor-5, fibronectin, glycoprotein 250, G antigen, N-acetylglucosaminyltransferase V, glycoprotein 100 kD, helicase antigen, human epidermal receptor-2/neurological, heat shock protein 70-2 mutated, human signet ring tumor-2, human telomerase reverse transcriptase, intestinal carboxyl esterase, interleukin 13 receptor [alpha]2 chain, [beta]-D-galactosidase 2-[alpha]-L-fucosyltransferase, melanoma antigen, melanoma antigen recognized by T cells-1/Melanoma antigen A, melanocortin 1 receptor, macrophage colony-stimulating factor, mucin 1, 2, melanoma ubiquitous mutated 1, 2, 3, New York-esophageous 1, ocular albinism type 1 protein, O-linked N-acetyl glucosamine transferase gene, protein 15, promyelocytic leukemia/retinoic acid receptor [alpha], prostate-specific antigen, prostate-specific membrane antigen, receptor-type protein-tyrosinephosphatase kappa, renal antigen, renal ubiquitous 1, 2, sarcoma antigen, squamous antigen rejecting tumor 1, 2, 3, synovial sarcoma, Survivin-2B, synaptotagmin I/synovial sarcoma, X fusion protein, translocation Ets-family leukemia/acute myeloid leukemia 1, transforming growth factor [beta] receptor 2, triosephosphate isomerase, taxol resistant associated protein 3, testin-related gene, tyrosinase related protein 1, and tyrosinase related protein 2.

[0482] The target biomarker can be a cancer-associated or tumor associated antigen. The cancer-associated antigen may include without limitation one or more of human Her2/neu, Her1/EGF receptor (EGFR), HER2 (ERBB2), Her3, Her4, A33 antigen, B7H3, CD5, CD19, CD20, CD22, CD23 (IgE Receptor), C242 antigen, 5T4, IL-6, IL-13, vascular endothelial growth factor VEGF (e.g., VEGF-A), VEGFR-1, VEGFR-2, CD30, CD33, CD37, CD40, CD44, CD51, CD52, CD56, CD74, CD80, CD152, CD200, CD221, CCR4, HLA-DR, CTLA-4, N PC-1C, tenascin, vimentin, insulin-like growth factor 1 receptor (IGF-1R), alpha-fetoprotein, insulin-like growth factor 1 (IGF-1), carbonic anhydrase 9 (CA-IX), carcinoem bryonic antigen (CEA), integrin ανβ3, integrin α5βt, folate receptor 1, transmembrane glycoprotein NMB, fibroblast activation protein alpha (FAP), glypican 1, glypican 3, glycoprotein 75, TAG-72, MUC1, MUC16 (also known as CA-125), phosphatidylserine, prostate-specific membrane antigen (PMSA), NR-LU-13 antigen, TRAIL-R1, tumor necrosis factor receptor superfamily member 10b (TNFRSF10B or TRAIL-R2), SLAM family member 7 (SLAM F7), EGP40 pancarcinoma antigen, B-cell activating factor (BAFF), platelet-derived growth factor receptor, glycoprotein EpCAM (17-1A), Programmed Death-1 (PD1), Programmed Death Ligand 1 (PD-L1), protein disulfide isomerase (PDI), Phosphatase of Regenerating Liver 3 (PRL-3), prostatic acid phosphatase, Lewis-Y antigen, GD2 (a disialoganglioside expressed on tumors of neuroectodermal origin), or mesothelin. For example, the target can be one or more of human Her2/neu, Her1/EGFR, TNF-α, B7H3 antigen, CD20, VEGF, CD52, CD33, CTLA-4, tenascin, alpha-4 (α4) integrin, IL-23, amyloid-β, Huntingtin, CD25, nerve growth factor (NGF), TrkA, and α-synuclein. In some embodiments, the target biomarker is a tumor antigen selected from the group consisting of PSMA, BRCA1, BRCA2, alpha-actinin-4, BCR-ABL fusion protein (b3a2), CASP-8, β-catenin, Cdc27, CDK4, dek-can fusion protein, Elongation factor 2, ETV6-AML1 fusion protein, LDLR-fucosyltransferase AS fusion protein, hsp70-2, KIAAO205, MART2, MUM-if, MUM-2, MUM-3, neo-PAP, Myosin class I, OS-9g, pml-RAR alpha fusion protein, PTPRK, K-ras, N-ras, CEA, gp100/Pme117, Kallikrein 4, mammaglobin-A, Melan-A/MART-1, PSA, TRP-1/gp75, TRP-2, tyrosinase, CPSF, EphA3, G250/MN/CAIX, HER-2/neu, Intestinal carboxyl esterase, alpha-fetoprotein, M-CSF, MUC1, p53, PRAME, RAGE-1, RU2AS, survivin, Telomerase, WT1, or CA125. In still other embodiments, the target biomarker is a tumor antigen selected from the group consisting of 4-1BB, 5T4, AGS-5, AGS-16, Angiopoietin 2, B7.1, B7.2, B7DC, B7H1, B7H2, B7H3, BT-062, BTLA, CAIX, Carcinoembryonic antigen, CTLA4, Cripto, ED-B, ErbBl, ErbB2, ErbB3, ErbB4, EGFL7, EpCAM, EphA2, EphA3, EphB2, EphB3, FAP, Fibronectin, Folate Receptor, Ganglioside GM3, GD2, glucocorticoid-induced tumor necrosis factor receptor (GITR), gp100, gpA33, GPNMB, ICOS, IGFIR, Integrin av, Integrin ανβ, KIR, LAG-3, Lewis Y, Mesothelin, c-MET, MN Carbonic anhydrase IX, MUC1, MUC16, Nectin-4, NKGD2, NOTCH, OX40, OX40L, PD-1, PDL1, PSCA, PSMA, RANKL, ROR1, ROR2, SLC44A4, Syndecan-1, TACI, TAG-72, Tenascin, TIM3, TRAILR1, TRAILR2,VEGFR-1, VEGFR-2, VEGFR-3, and variants thereof. In still other embodiments, the target biomarker is a tumor-associated antigen selected from the group consisting of Lewis Y, Muc-1, erbB-2,-3 and-4, Ep-CAM, EGF-receptor (e.g., EGFR type I or EGFR type II), EGFR deletion neoepitope, CA19-9, Muc-1, LeY, TF−, Tn-and sTn-antigen, TAG-72, PSMA, STEAP, Cora antigen, CD7, CD19 and CD20, CD22, CD25, Ig-α and Ig-β, A33 and G250, CD30, MCSP and gp100, CD44-v6, MT-MMPs, (MIS) receptor type II, carboanhydrase 9, F19-antigen, Ly6, desmoglein 4, PSCA, Wue-1, GD2 and GD3 as well as TM4SF-antigens (CD63, L6, CO-29, SAS) and the alpha and/or gamma subunit of the fetal type acetylcholinreceptor (AChR). The target biomarker can be a cancer antigen selected from A33, BAGE, Bcl-2, β-catenin, CA125, CA19-9, CD5, CD19, CD20, CD21, CD22, CD33, CD37, CD45, CD123, CEA, c-Met, CS-1, cyclin B1, DAGE, EBNA, EGFR, ephrinB2, estrogen receptor, FAP, ferritin, folate-binding protein, GAGE, G250, GD-2, GM2, gp75, gp100 (Pmel 17), HER-2/neu, HPV E6, HPV E7, Ki-67, LRP, mesothelin, p53, PRAME, progesterone receptor, PSA, PSMA, MAGE, MART, mesothelin, MUC, MUM-1-B, myc, NYESO-1, ras, RORI, survivin, tenascin, TSTA tyrosinase, VEGF, and WT1. The target biomarker can also be a tumor antigen selected from carcinoembryonic antigen (CEA), alpha-fetoprotein (AFP), prostate specific antigen (PSA), prostate specific membrane antigen (PSMA), CA-125 (epithelial ovarian cancer), soluble Interleukin-2 (IL-2) receptor, RAGE-1, tyrosinase, MAGE-1, MAGE-2, NY-ESO-1, Melan-A/MART-1, glycoprotein (gp) 75, gp100, beta-catenin, PRAME, MUM-1, ZFP161, Ubiquilin-1, HOX-B6, YB-1, Osteonectin, ILF3, or IGF-1. In some embodiments, the cancer-related antigen is one or more of CD2, CD4, CD19, CD20, CD22, CD23, CD30, CD33, CD37, CD40, CD44v6, CD52, CD56, CD70, CD74, CD79a, CD80, CD98, CD138, EGFR (Epidermal growth factor receptor), VEGF (Vascular endothelial growth factor), VEGFR1 (Vascular endothelial growth factor receptor I), PDGFR (Platelet-derived growth factor receptor), RANKL (Receptor activator of nuclear factor kappa-B ligand), GPNMB (Transmembrane glycoprotein Neuromedin B), EphA 2 (Ephrin type-A receptor 2), PSMA (Prostate-specific membrane antigen), Cripto (Cryptic family protein 1B), EpCAM (Epithelial cell adhesion molecule), CTLA 4 (Cytotoxic T-Lymphocyte Antigen 4), IGF-IR (Type 1 insulin-like growth factor receptor), GP3 (M13 bacteriophage), GP9 (Glycoprotein IX (platelet), CD42a, GP 40 (Glycoprotein 40 kDa), GPC3 (glypican-3), GPC 1 (glypican-1), TRAILR1 (Tumor necrosis factor-related apoptosis-inducing ligand receptor 1), TRAILRII (Tumor necrosis factor-related apoptosis-inducing ligand receptor II), FAS (Type II transmembrane protein), PS (phosphatidyl serine) lipid, Gal GalNac Gal N-linked, Muc1 (Mucin 1, cell surface associated, PEM), Muc18, CD146, A5B1 integrin (α5β1), α4β1 integrin, av integrin (Vitronectin Receptor), Chondrolectin, CAIX (Carbonic anhydrase IX, gene G250/MN-encoded transmembrane protein), GD2 gangloside, GD3 gangloside, GM1 gangloside, Lewis Y, Mesothelin, HER2 (Human Epidermal Growth factor 2), HER3, HER4, FN14 (Fibroblast Growth Factor Inducible 14), CS 1 (Cell surface glycoprotein, CD2 subset 1, CRACC, SLAMF7, CD319), 41BB CD137, SIP (Siah-1 Interacting Protein), CTGF (Connective tissue growth factor), HLADR (MHC class II cell surface receptor), PD-1 (Programmed Death 1, Type I membrane protein, PD-L1 (Programmed Death Ligand 1), PD-L2 (Programmed Death Ligand 2), IL-2 (Interleukin-2), IL-8 (Interleukin-8), IL-13 (Interleukin-13), PIGF (Phosphatidylinositol-glycan biosynthesis class F protein), NRP1 (Neuropilin-1), ICAM1, CD54, GC182 (Claudin 18.2), Claudin, HGF (Hepatocyte growth factor), CEA (Carcinoembryonic antigen), LTβR (lymphotoxin β receptor), Kappa Myeloma, Folate Receptor alpha, GRP78 (BIP, 78 kDa Glucose-regulated protein), A33 antigen, PSA (Prostate-specific antigen), CA 125 (Cancer antigen 125 or carbohydrate antigen 125), CA19.9, CA15.3, CA242, leptin, prolactin, osteopontin, IGF-II (Insulin-like growth factor 2), fascin, sPIgR (secreted chain of polymorphic immunoglobulin receptor), 14-3-3 protein eta, 5T4 oncofetal protein, ETA (epithelial tumor antigen), MAGE (Melanoma-associated antigen), MAPG (Melanoma-associated proteoglycan, NG2), vimentin, EPCA-1 (Early prostate cancer antigen-2), TAG-72 (Tumor-associated glycoprotein 72), factor VIII, Neprilysin (Membrane metallo-endopeptidase) and 17-1 A (Epithelial cell surface antigen 17-1A). The cancer antigen can be selected from the group consisting of carbonic anhydrase IX, alpha-fetoprotein, A3, antigen specific for A33 antibody, Ba 733, BrE3-antigen, CA125, CD1, CD1a, CD3, CD5, CD15, CD16, CD19, CD20, CD21, CD22, CD23, CD25, CD30, CD33, CD38, CD45, CD74, CD79a, CD80, CD138, colon-specific antigen-p (CSAp), CEA (CEACAM5), CEACAM6, CSAp, EGFR, EGP-1, EGP-2, Ep-CAM, Flt-1, Flt-3, folate receptor, HLA-DR, human chorionic gonadotropin (HCG) and its subunits, HER2/neu, hypoxia inducible factor (HIF-1), Ia, IL-2, IL-6, IL-8, insulin growth factor-1 (IGF-1), KC4-antigen, KS-1-antigen, KS1-4, Le-Y, macrophage inhibition factor (MIF), MAGE, MUC1, MUC2, MUC3, MUC4, MUC16, NCA66, NCA95, NCA90, antigen specific for PAM-4 antibody, placental growth factor, p53, prostatic acid phosphatase, PSA, PSMA, RS5, S100, TAC, TAG-72, tenascin, TRAIL receptors, Tn antigen, Thomson-Friedenreich antigens, tumor necrosis antigens, VEGF, ED-B fibronectin, 17-1A-antigen, an angiogenesis marker, an oncogene marker and an oncogene product.

[0483] The tumor marker can be a generic tumor marker or be associated with certain tumor types, such as those originating from different anatomical origins. In an embodiment, the tumor marker can be chosen to correspond to a certain tumor type. For example, exemplary tumor markers and associated tumor types include without limitation the following, listed as antigen (optional name) (cancer types): Alpha fetoprotein (AFP) (germ cell tumor, hepatocellular carcinoma); CA15-3 (breast cancer); CA27-29 (breast cancer); CA19-9 (mainly pancreatic cancer, but also colorectal cancer and other types of gastrointestinal cancer); CA-125 (ovarian cancer, endometrial cancer, fallopian tube cancer, lung cancer, breast cancer and gastrointestinal cancer); Calcitonin (medullary thyroid carcinoma); Calretinin (mesothelioma, sex cord-gonadal stromal tumour, adrenocortical carcinoma, synovial sarcoma); Carcinoembryonic antigen (gastrointestinal cancer, cervix cancer, lung cancer, ovarian cancer, breast cancer, urinary tract cancer); CD34 (hemangiopericytoma/solitary fibrous tumor, pleomorphic lipoma, gastrointestinal stromal tumor, dermatofibrosarcoma protuberans); CD99 (MIC2) (Ewing sarcoma, primitive neuroectodermal tumor, hemangiopericytoma/solitary fibrous tumor, synovial sarcoma, lymphoma, leukemia, sex cord-gonadal stromal tumour); CD117 (gastrointestinal stromal tumor, mastocytosis, seminoma); Chromogranin (neuroendocrine tumor); Chromosomes 3, 7, 17, and 9p21 (bladder cancer); Cytokeratin (various types) (various carcinoma, some types of sarcoma); Desmin (smooth muscle sarcoma, skeletal muscle sarcoma, endometrial stromal sarcoma); Epithelial membrane antigen (EMA) (many types of carcinoma, meningioma, some types of sarcoma); Factor VIII (CD31, FL1) (vascular sarcoma); Glial fibrillary acidic protein (GFAP) (glioma (astrocytoma, ependymoma)); Gross cystic disease fluid protein (GCDFP-15) (breast cancer, ovarian cancer, salivary gland cancer); HMB-45 (melanoma, PEComa (for example angiomyolipoma), clear cell carcinoma, adrenocortical carcinoma); Human chorionic gonadotropin (hCG) (gestational trophoblastic disease, germ cell tumor, choriocarcinoma); Immunoglobulin (lymphoma, leukemia); Inhibin (sex cord-gonadal stromal tumour, adrenocortical carcinoma, hemangioblastoma); keratin (various types) (carcinoma, some types of sarcoma); lymphocyte marker (various types, lymphoma, leukemia); MART-1 (Melan-A) (melanoma, steroid-producing tumors (adrenocortical carcinoma, gonadal tumor)); Myo D1 (rhabdomyosarcoma, small, round, blue cell tumour); muscle-specific actin (MSA) (myosarcoma (leiomyosarcoma, rhabdomyosarcoma); neurofilament (neuroendocrine tumor, small-cell carcinoma of the lung); neuron-specific enolase (NSE) (neuroendocrine tumor, small-cell carcinoma of the lung, breast cancer); placental alkaline phosphatase (PLAP) (seminoma, dysgerminoma, embryonal carcinoma); prostate-specific antigen (prostate); PTPRC (CD45) (lymphoma, leukemia, histiocytic tumor); S100 protein (melanoma, sarcoma (neurosarcoma, lipoma, chondrosarcoma), astrocytoma, gastrointestinal stromal tumor, salivary gland cancer, some types of adenocarcinoma, histiocytic tumor (dendritic cell, macrophage)); smooth muscle actin (SMA) (gastrointestinal stromal tumor, leiomyosarcoma, PEComa); synaptophysin (neuroendocrine tumor); thyroglobulin (thyroid cancer but not typically medullary thyroid cancer); thyroid transcription factor-1 (all types of thyroid cancer, lung cancer); Tumor M2-PK (colorectal cancer, Breast cancer, renal cell carcinoma, Lung cancer, Pancreatic cancer, Esophageal Cancer, Stomach Cancer, Cervical Cancer, Ovarian Cancer); Vimentin (sarcoma, renal cell carcinoma, endometrial cancer, lung carcinoma, lymphoma, leukemia, melanoma). Additional tumor types and associated biomarkers comprise the following, listed as tumor type (markers): Colorectal (M2-PK, CEA, CA 19-9, CA 125); Breast (CEA, CA 15-3, Cyfra 21-1); Ovary (CEA, CA 19-9, CA 125, AFP, BHCG); Uterine (CEA, CA 19-9, CA 125, Cyfra 21-1, SCC); Prostate (PSA); Testicle (AFP, BHCG); Pancreas/Stomach (CEA, CA 19-9, CA 72-4); Liver (CEA, AFP); Oesophagus (CEA, Cyfra 21-1); Thyroid (CEA, NSE); Lung (CEA, CA 19-9, CA 125, NSE, Cyfra 21-1); Bladder (CEA, Cyfra 21-1, TPA). One or more of these markers can be used as the target biomarker recognized by the variable region of the multipartite construct of the invention.

[0484] In some embodiments of the invention, the target biomarker recognized by the variable region comprises one or more of PDGF, IgE, IgE Fcε R1, PSMA, CD22, TNF-alpha, CTLA4, PD-1, PD-L1, PD-L2, FcRIIB, BTLA, TIM-3, CD11c, BAFF, B7-X, CD19, CD20, CD25, and CD33. The target biomarker can also be a protein comprising one or more of insulin-like growth factor 1 receptor (IGF1R), IGF2R, insulin-like growth factor (IGF), mesenchymal epithelial transition factor receptor (c-met), hepatocyte growth factor (HGF), epidermal growth factor receptor (EGFR), ErbB2, ErbB3, epidermal growth factor (EGF), heregulin, fibroblast growth factor receptor (FGFR), platelet-derived growth factor receptor (PDGFR), platelet-derived growth factor (PDGF), vascular endothelial growth factor receptor (VEGFR), vascular endothelial growth factor (VEGF), tumor necrosis factor receptor (TNFR), tumor necrosis factor alpha (TNF-a), folate receptor (FOLR), folate, transferrin receptor (TfR), mesothelia, Fc receptor, c-kit receptor, c-kit, a4 integrin, P-selectin, sphingosine-1-phosphate receptor-1 (S1PR), hyaluronate receptor, leukocyte function antigen-1 (LFA-1), CD4, CD11, CD18, CD20, CD25, CD27, CD52, CD70, CD80, CD85, CD95 (Fas receptor), CD106 (vascular cell adhesion molecule 1 (VCAM1)), CD166 (activated leukocyte cell adhesion molecule (ALCAM)), CD 178 (Fas ligand), CD253 (TNF-related apoptosis-inducing ligand (TRAIL)), inducible costimulator (ICOS) ligand, CCR2, CXCR3, CCR5, CXCL12 (stromal cell-derived factor 1 (SDF-1)), interleukin 1 (IL-1), cytotoxic T-lymphocyte antigen 4 (CTLA-4), MART-1, gp100, MAGE-1, ephrin (Eph) receptor, mucosal addressin cell adhesion molecule 1 (MAdCAM-1), carcinoembryonic antigen (CEA), LewisY, MUC-1, epithelial cell adhesion molecule (EpCAM), cancer antigen 125 (CA125), prostate specific membrane antigen (PSMA), TAG-72 antigen, and fragments thereof. In various embodiments, the target biomarker comprises one or more of PSMA, PSCA, e selectin, an ephrin, ephB2, cripto-1, TENB2 (TEMFF2), ERBB2 receptor (HER2), MUC1, CD44v6, CD6, CD19, CD20, CD22, CD23, CD25, CD30, CD33, CD56, IL-2 receptor, HLA-DR10 B subunit, EGFR, CA9, caveolin-1 and nucleolin.

[0485] The target biomarker can be a microvesicle antigen, such as a microvesicle antigen herein or Table 4 of International Patent Application PCT/US2016/040157. For example, the target biomarker can be one or more microvesicle antigen selected from CD9, EphA2, EGFR, B7H3, PSMA, PCSA, CD63, STEAP, CD81, B7H3, STEAP1, ICAM1 (CD54), A33, DR3, CD66e, MFG-e8, Hepsin, TMEM211, TROP-2, EGFR, Mammoglobin, Hepsin, NPGP/NPFF2, PSCA, 5T4, NGAL, NK-2, EpCam, NK-1R, 5T4, PAI-1, and CD45. The target biomarker can be one or more microvesicle antigen selected from SPB, SPC, NSE, PGP9.5, CD9, P2RX7, NDUFB7, NSE, Gal3, Osteopontin, CHI3L1, EGFR, B7H3, iC3b, MUC1, Mesothelin, SPA, TPA, PCSA, CD63, AQP5, DLL4, CD81, DR3, PSMA, GPCR 110 (GPR110), EPHA2, CEACAM, PTP, CABYR, TMEM211, ADAM28, UNC93a, A33, CD24, CD10, NGAL, EpCam, MUC17, TROP2 and MUC2. In some embodiments, the target biomarker comprises one or more microvesicle antigen selected from CD9, CD63, CD81, B7H3, PRO GRP, CYTO 18, FTH1, TGM2, CENPH, ANNEXIN I, ANNEXIN V, ERBB2, EGFR, CRP, VEGF, CYTO 19, CCL2, Osteopontin (OST19), Osteopontin (OST22), BTUB, CD45, TIMP, NACC1, MMP9, BRCA1, P27, NSE, M2PK, HCG, MUC1, CEA, CEACAM, CYTO 7, EPCAM, MS4A1, MUC1, MUC2, PGP9, SPA, SPA, SPD, P53, GPCR (GPR110), SFTPC, UNCR2, NSE, INGA3, INTO b4, MMP1, PNT, RACK1, NAP2, HLA, BMP2, PTH1R, PAN ADH, NCAM, CD151, CKS1, FSHR, HIF, KRAS, LAMP2, SNAIL, TRIM29, TSPAN1, TWIST1, ASPH and AURKB. In another embodiment, the target biomarker is selected from the group of proteins consisting of CD9, PSMA, PCSA, CD63, CD81, B7H3, IL 6, OPG-13, IL6R, PA2G4, EZH2, RUNX2, SERPINB3, and EpCam. In another embodiment, a target biomarker is selected from the group of proteins consisting of A33, a33 n15, AFP, ALA, ALIX, ALP, AnnexinV, APC, ASCA, ASPH (246-260), ASPH (666-680), ASPH (A-10), ASPH (D01P), ASPH (D03), ASPH (G-20), ASPH (H-300), AURKA, AURKB, B7H3, B7H4, BCA-225, BCNP1, BDNF, BRCA, CA125 (MUC16), CA-19-9, C-Bir, CD1.1, CD10, CD174 (Lewis y), CD24, CD44, CD46, CD59 (MEM-43), CD63, CD66e CEA, CD73, CD81, CD9, CDA, CDAC11a2, CEA, C-Erb2, C-erbB2, CRMP-2, CRP, CXCL12, CYFRA21-1, DLL4, DR3, EGFR, Epcam, EphA2, EphA2 (H-77), ER, ErbB4, EZH2, FASL, FRT, FRT c.f23, GDF15, GPCR, GPR30, Gro-alpha, HAP, HBD 1, HBD2, HER 3 (ErbB3), HSP, HSP70, hVEGFR2, iC3b, IL 6 Unc, IL-1B, IL6 Unc, IL6R, IL8, IL-8, INSIG-2, KLK2, L1CAM, LAMN, LDH, MACC-1, MAPK4, MART-1, MCP-1, M-CSF, MFG-E8, MIC1, MIF, MIS RII, MMG, MMP26, MMP7, MMP9, MS4A1, MUC1, MUC1 seq1, MUC1 seq11A, MUC17, MUC2, Ncam, NGAL, NPGP/NPFF2, OPG, OPN, p53, p53, PA2G4, PBP, PCSA, PDGFRB, PGP9.5, PIM1, PR (B), PRL, PSA, PSMA, PSME3, PTEN, R5-CD9 Tube 1, Reg IV, RUNX2, SCRN1, seprase, SERPINB3, SPARC, SPB, SPDEF, SRVN, STAT 3, STEAP1, TF (FL-295), TFF3, TGM2, TIMP-1, TIMP1, TIMP2, TMEM211, TMPRSS2, TNF-alpha, Trail-R2, Trail-R4, TrKB, TROP2, Tsg 101, TWEAK, UNC93A, VEGF A, and YPSMA-1. The target biomarker can be selected from the group of proteins consisting of 5T4, A33, ACTG1, ADAM10, ADAM15, AFP, ALA, ALDOA, ALIX, ALP, ALX4, ANCA, Annexin V, ANXA2, ANXA6, APC, APOA1, ASCA, ASPH, ATP1A1, AURKA, AURKB, B7H3, B7H4, BANK1, BASP1, BCA-225, BCNP1, BDNF, BRCA, Clorf58, C20orf114, C8B, CA125 (MUC16), CA-19-9, CAPZA1, CAV1, C-Bir, CCSA-2, CCSA-3&4, CD1.1, CD10, CD151, CD174 (Lewis y), CD24, CD2AP, CD37, CD44, CD46, CD53, CD59, CD63, CD66 CEA, CD73, CD81, CD82, CD9, CDA, CDAC11a2, CEA, C-Erbb2, CFL1, CFP, CHMP4B, CLTC, COTL1, CRMP-2, CRP, CRTN, CTNND1, CTSB, CTSZ, CXCL12, CYCS, CYFRA21-1, DcR3, DLL4, DPP4, DR3, EEF1A1, EGFR, EHD1, ENO1, EpCAM, EphA2, ER, ErbB4, EZH2, F11R, F2, F5, FAM125A, FASL, Ferritin, FNBP1L, FOLH1, FRT, GAL3, GAPDH, GDF15, GLB1, GPCR (GPR110), GPR30, GPX3, GRO-1, Gro-alpha, HAP, HBD 1, HBD2, HER 3 (ErbB3), HIST1HIC, HIST1H2AB, HNP1-3, HSP, HSP70, HSP90AB1, HSPA1B, HSPA8, hVEGFR2, iC3b, ICAM, IGSF8, IL 6, IL-1B, IL6R, IL8, IMP3, INSIG-2, ITGB1, ITIH3, JUP, KLK2, L1CAM, LAMN, LDH, LDHA, LDHB, LUM, LYZ, MACC-1, MAPK4, MART-1, MCP-1, M-CSF, MFGE8, MGAM, MGC20553, MIC1, MIF, MIS RII, MMG, MMP26, MMP7, MMP9, MS4A1, MUC1, MUC17, MUC2, MYH2, MYL6B, Ncam, NGAL, NME1, NME2, NNMT, NPGP/NPFF2, OPG, OPG-13, OPN, p53, PA2G4, PABPC1, PABPC4, PACSIN2, PBP, PCBP2, PCSA, PDCD6IP, PDGFRB, PGP9.5, PIM1, PR (B), PRDX2, PRL, PSA, PSCA, PSMA, PSMA1, PSMA2, PSMA4, PSMA6, PSMA7, PSMB1, PSMB2, PSMB3, PSMB4, PSMB5, PSMB6, PSMB8, PSME3, PTEN, PTGFRN, Rab-5b, Reg IV, RPS27A, RUNX2, SCRN1, SDCBP, seprase, Sept-9, SERINC5, SERPINB3, SERPINB3, SH3GL1, SLC3A2, SMPDL3B, SNX9, SPARC, SPB, SPDEF, SPON2, SPR, SRVN, SSX2, SSX4, STAT 3, STEAP, STEAP1, TACSTD1, TCN2, tetraspanin, TF (FL-295), TFF3, TGM2, THBS1, TIMP, TIMP1, TIMP2, TMEM211, TMPRSS2, TNF-alpha, TPA, TPI1, TPS, Trail-R2, Trail-R4, TrKB, TROP2, TROP2, Tsg 101, TUBB, TWEAK, UNC93A, VDAC2, VEGF A, VPS37B, YPSMA-1, YWHAG, YWHAQ, and YWHAZ. In another embodiment, the target biomarker is selected from the group of proteins consisting of 5T4, ACTG1, ADAM10, ADAM15, ALDOA, ANXA2, ANXA6, APOA1, ATP1A1, BASP1, Clorf58, C20orf114, C8B, CAPZA1, CAV1, CD151, CD2AP, CD59, CD9, CD9, CFL1, CFP, CHMP4B, CLTC, COTL1, CTNND1, CTSB, CTSZ, CYCS, DPP4, EEF1A1, EHD1, ENO1, F11R, F2, F5, FAM125A, FNBP1L, FOLH1, GAPDH, GLB1, GPX3, HIST1HIC, HIST1H2AB, HSP90AB1, HSPA1B, HSPA8, IGSF8, ITGB1, ITIH3, JUP, LDHA, LDHB, LUM, LYZ, MFGE8, MGAM, MMP9, MYH2, MYL6B, NME1, NME2, PABPC1, PABPC4, PACSIN2, PCBP2, PDCD6IP, PRDX2, PSA, PSMA, PSMA1, PSMA2, PSMA4, PSMA6, PSMA7, PSMB1, PSMB2, PSMB3, PSMB4, PSMB5, PSMB6, PSMB8, PTGFRN, RPS27A, SDCBP, SERINC5, SH3GL1, SLC3A2, SMPDL3B, SNX9, TACSTD1, TCN2, THBS1, TPI1, TSG101, TUBB, VDAC2, VPS37B, YWHAG, YWHAQ, and YWHAZ. In another embodiment, the target biomarker is selected from the group of proteins consisting of CD9, CD63, CD81, PSMA, PCSA, B7H3 and EpCam. In another embodiment, the target biomarker is selected from the group of proteins consisting of a tetraspanin, CD9, CD63, CD81, CD63, CD9, CD81, CD82, CD37, CD53, Rab-5b, Annexin V, MFG-E8, Muc1, GPCR 110, TMEM211 and CD24 In another embodiment, the target biomarker is selected from the group of proteins consisting of A33, AFP, ALIX, ALX4, ANCA, APC, ASCA, AURKA, AURKB, B7H3, BANK1, BCNP1, BDNF, CA-19-9, CCSA-2, CCSA-3&4, CD10, CD24, CD44, CD63, CD66 CEA, CD66e CEA, CD81, CD9, CDA, C-Erb2, CRMP-2, CRP, CRTN, CXCL12, CYFRA21-1, DcR3, DLL4, DR3, EGFR, Epcam, EphA2, FASL, FRT, GAL3, GDF15, GPCR (GPR110), GPR30, GRO-1, HBD 1, HBD2, HNP1-3, IL-1B, IL8, IMP3, L1CAM, LAMN, MACC-1, MGC20553, MCP-1, M-CSF, MIC1, MIF, MMP7, MMP9, MS4A1, MUC1, MUC17, MUC2, Ncam, NGAL, NNMT, OPN, p53, PCSA, PDGFRB, PRL, PSMA, PSME3, Reg IV, SCRN1, Sept-9, SPARC, SPON2, SPR, SRVN, TFF3, TGM2, TIMP-1, TMEM211, TNF-alpha, TPA, TPS, Trail-R2, Trail-R4, TrKB, TROP2, Tsg 101, TWEAK, UNC93A, and VEGFA. In another embodiment, the target biomarker is selected from the group of proteins consisting of CD9, EGFR, NGAL, CD81, STEAP, CD24, A33, CD66E, EPHA2, Ferritin, GPR30, GPR110, MMP9, OPN, p53, TMEM211, TROP2, TGM2, TIMP, EGFR, DR3, UNC93A, MUC17, EpCAM, MUC1, MUC2, TSG101, CD63, B7H3, CD24, and a tetraspanin. The target biomarker can be selected from the group of proteins consisting of 5HT2B, 5T4 (trophoblast), ACO2, ACSL3, ACTN4, ADAM10, AGR2, AGR3, ALCAM, ALDH6A1, ANGPTL4, ANO9, AP1G1, APC, APEX1, APLP2, APP (Amyloid precursor protein), ARCN1, ARHGAP35, ARL3, ASAH1, ASPH (A-10), ATP1B1, ATP1B3, ATP5I, ATP5O, ATXN1, B7H3, BACE1, BAI3, BAIAP2, BCA-200, BDNF, BigH3, BIRC2, BLVRB, BRCA, BST2, C1GALT1, C1GALTIC1, C20orf3, CA125, CACYBP, Calmodulin, CAPN1, CAPNS1, CCDC64B, CCL2 (MCP-1), CCT3, CD10(BD), CD127 (IL7R), CD174, CD24, CD44, CD80, CD86, CDH1, CDH5, CEA, CFL2, CHCHD3, CHMP3, CHRDL2, CIB1, CKAP4, COPA, COX5B, CRABP2, CRIP1, CRISPLD1, CRMP-2, CRTAP, CTLA4, CUL3, CXCR3, CXCR4, CXCR6, CYB5B, CYB5R1, CYCS, CYFRA 21, DBI, DDX23, DDX39B, derlin 1, DHCR7, DHX9, DLD, DLL4, DNAJB1, DPP6, DSTN, eCadherin, EEF1D, EEF2, EFTUD2, EIF4A2, EIF4A3, EpCaM, EphA2, ER(1) (ESR1), ER(2) (ESR2), Erb B4, Erbb2, erbb3 (Erb-B3), ERLIN2, ESD, FARSA, FASN, FEN1, FKBP5, FLNB, FOXP3, FUS, Gal3, GCDPF-15, GCNT2, GNA12, GNG5, GNPTG, GPC1, GPC2, GPC3, GPC4, GPC5, GPC6, GPD2, GPER (GPR30), GSPT1, H3F3B, H3F3C, HADH, HAP1, HER3, HIST1HIC, HIST1H2AB, HIST1H3A, HIST1H3C, HIST1H3D, HIST1H3E, HIST1H3F, HIST1H3G, HIST1H3H, HIST1H3I, HIST1H3J, HIST2H2BF, HIST2H3A, HIST2H3C, HIST2H3D, HIST3H3, HMGB1, HNRNPA2B1, HNRNPAB, HNRNPC, HNRNPD, HNRNPH2, HNRNPK, HNRNPL, HNRNPM, HNRNPU, HPS3, HSP-27, HSP70, HSP90B1, HSPA1A, HSPA2, HSPA9, HSPE1, IC3b, IDE, IDH3B, IDO1, IFI30, IL1RL2, IL7, IL8, ILF2, ILF3, IQCG, ISOC2, IST1, ITGA7, ITGB7, junction plakoglobin, Keratin 15, KRAS, KRT19, KRT2, KRT7, KRT8, KRT9, KTN1, LAMP1, LMNA, LMNB1, LNPEP, LRPPRC, LRRC57, Mammaglobin, MAN1A1, MAN1A2, MART1, MATR3, MBD5, MCT2, MDH2, MFGE8, MFGE8, MGP, MMP9, MRP8, MUC1, MUC17, MUC2, MYO5B, MYOF, NAPA, NCAM, NCL, NG2 (CSPG4), Ngal, NHE-3, NME2, NONO, NPM1, NQO1, NT5E (CD73), ODC1, OPG, OPN (SC), OS9, p53, PACSIN3, PAICS, PARK7, PARVA, PC, PCNA, PCSA, PD-1, PD-L1, PD-L2, PGP9.5, PHB, PHB2, PIK3C2B, PKP3, PPL, PR(B), PRDX2, PRKCB, PRKCD, PRKDC, PSA, PSAP, PSMA, PSMB7, PSMD2, PSME3, PYCARD, RAB1A, RAB3D, RAB7A, RAGE, RBL2, RNPEP, RPL14, RPL27, RPL36, RPS25, RPS4X, RPS4Y1, RPS4Y2, RUVBL2, SET, SHMT2, SLAIN1, SLC39A14, SLC9A3R2, SMARCA4, SNRPD2, SNRPD3, SNX33, SNX9, SPEN, SPR, SQSTM1, SSBP1, ST3GAL1, STXBP4, SUB1, SUCLG2, Survivin, SYT9, TFF3 (secreted), TGOLN2, THBS1, TIMP1, TIMP2, TMED10, TMED4, TMED9, TMEM211, TOM1, TRAF4 (scaffolding), TRAIL-R2, TRAP1, TrkB, Tsg 101, TXNDC16, U2AF2, UEVLD, UFC1, UNC93a, USP14, VASP, VCP, VDAC1, VEGFA, VEGFR1, VEGFR2, VPS37C, WIZ, XRCC5, XRCC6, YB-1, YWHAZ, or any combination thereof. In other embodiments, the target biomarker is selected from the group consisting of p53, p63, p73, mdm-2, procathepsin-D, B23, C23, PLAP, CA125, MUC-1, HER2, NY-ESO-1, SCP1, SSX-1, SSX-2, SSX-4, HSP27, HSP60, HSP90, GRP78, TAG72, HoxA7, HoxB7, EpCAM, ras, mesothelin, survivin, EGFK, MUC-1, or c-myc. The microvesicle antigen can be from any herein, or Table 4 of International Patent Application PCT/US2016/040157.

[0486] One of skill will appreciate that the above biomarker listings are not intended to be mutually exclusive. For example, a single target biomarker can have one or more of the following attributes: cancer/tumor antigen, cell antigen, microvesicle antigen, membrane antigen, and any combination thereof. In some embodiments, the target biomarker will have all of these attributes.

[0487] As noted above, the IDM domain can be constructed to illicit a complement mediated immune response that can induce apoptosis. Such IDM can include but are not limited to C1q, C1r, C1s, C1, C3a, C3b, C3d, C5a, C2, C4, and cytokines. The IDM region may comprise an oligonucleotide sequence including without limitation Toll-Like Receptor (TLR) agonists like CpG sequences which are immunostimulatory and/or polyG sequences which can be anti-proliferative or pro-apoptotic. The moiety can be vaccine like moiety or antigen that stimulates an immune response. In an embodiment, the immune stimulating moiety comprises a superantigen. In some embodiments, the superantigen can be selected from the group consisting of staphylococcal enterotoxins (SEs), a Streptococcus pyogenes exotoxin (SPE), a Staphylococcus aureus toxic shock-syndrome toxin (TSST-1), a streptococcal mitogenic exotoxin (SME), a streptococcal superantigen (SSA), a hepatitis surface antigen, or a combination thereof. Other bacterial antigens that can be used with the invention comprise bacterial antigens such as Freund's complete adjuvant, Freund's incomplete adjuvant, monophosphoryl-lipid A/trehalose dicorynomycolate (Ribi's adjuvant), BCG (Calmette-Guerin Bacillus; Mycobacterium bovis), and Corynebacterium parvum. The immune stimulating moiety can also be a non-specific immunostimulant, such as an adjuvant or other non-specific immunostimulator. Useful adjuvants comprise without limitation aluminium salts, alum, aluminium phosphate, aluminium hydroxide, squalene, oils, MF59, and AS03 (“Adjuvant System 03”). The adjuvant can be selected from the group consisting of Cationic liposome-DNA complex JVRS-100, aluminum hydroxide vaccine adjuvant, aluminum phosphate vaccine adjuvant, aluminum potassium sulfate adjuvant, Alhydrogel, ISCOM(s)™, Freund's Complete Adjuvant, Freund's Incomplete Adjuvant, CpG DNA Vaccine Adjuvant, Cholera toxin, Cholera toxin B subunit, Liposomes, Saponin Vaccine Adjuvant, DDA Adjuvant, Squalene-based Adjuvants, Etx B subunit Adjuvant, IL-12 Vaccine Adjuvant, LTK63 Vaccine Mutant Adjuvant, TiterMax Gold Adjuvant, Ribi Vaccine Adjuvant, Montanide ISA 720 Adjuvant, Corynebacterium-derived P40 Vaccine Adjuvant, MPL™ Adjuvant, AS04, AS02, Lipopolysaccharide Vaccine Adjuvant, Muramyl Dipeptide Adjuvant, CRL1005, Killed Corynebacterium parvum Vaccine Adjuvant, Montanide ISA 51, Bordetella pertussis component Vaccine Adjuvant, Cationic Liposomal Vaccine Adjuvant, Adamantylamide Dipeptide Vaccine Adjuvant, Arlacel A, VSA-3 Adjuvant, Aluminum vaccine adjuvant, Polygen Vaccine Adjuvant, Adjumer™, Algal Glucan, Bay R1005, Theramide®, Stearyl Tyrosine, Specol, Algammulin, Avridine®, Calcium Phosphate Gel, CTA1-DD gene fusion protein, DOC/Alum Complex, Gamma Inulin, Gerbu Adjuvant, GM-CSF, GMDP, Recombinant hIFN-gamma/Interferon-g, Interleukin-1β, Interleukin-2, Interleukin-7, Sclavo peptide, Rehydragel LV, Rehydragel HPA, Loxoribine, MF59, MTP-PE Liposomes, Murametide, Murapalmitine, D-Murapalmitine, NAGO, Non-Ionic Surfactant Vesicles, PMMA, Protein Cochleates, QS-21, SPT (Antigen Formulation), nanoemulsion vaccine adjuvant, AS03, Quil-A vaccine adjuvant, RC529 vaccine adjuvant, LTR192G Vaccine Adjuvant, E. coli heat-labile toxin, LT, amorphous aluminum hydroxyphosphate sulfate adjuvant, Calcium phosphate vaccine adjuvant, Montanide Incomplete Seppic Adjuvant, Imiquimod, Resiquimod, AF03, Flagellin, Poly(I:C), ISCOMATRIX®, Abisco-100 vaccine adjuvant, Albumin-heparin microparticles vaccine adjuvant, AS-2 vaccine adjuvant, B7-2 vaccine adjuvant, DHEA vaccine adjuvant, Immunoliposomes Containing Antibodies to Costimulatory Molecules, SAF-1, Sendai Proteoliposomes, Sendai-containing Lipid Matrices, Threonyl muramyl dipeptide (TMDP), Ty Particles vaccine adjuvant, Bupivacaine vaccine adjuvant, DL-PGL (Polyester poly (DL-lactide-co-glycolide)) vaccine adjuvant, IL-15 vaccine adjuvant, LTK72 vaccine adjuvant, MPL-SE vaccine adjuvant, non-toxic mutant E112K of Cholera Toxin mCT-E112K, and Matrix-S. Additional adjuvants that can be used with the multipartite constructs of the invention can be identified using the Vaxjo database. See Sayers S, Ulysse G, Xiang Z, and He Y. Vaxjo: a web-based vaccine adjuvant database and its application for analysis of vaccine adjuvants and their uses in vaccine development. Journal of Biomedicine and Biotechnology. 2012; 2012:831486. Epub 2012 Mar. 13. PMID: 22505817; www.violinet.org/vaxjo/. Other useful non-specific immunostimulators comprise histamine, interferon, transfer factor, tuftsin, interleukin-1, female sex hormones, prolactin, growth hormone vitamin D, deoxycholic acid (DCA), tetrachlorodecaoxide (TCDO), and imiquimod or resiquimod, which are drugs that activate immune cells through the toll-like receptor 7. A multipartite construct can be created that comprises more than one immunomodulating moiety, e.g., using segments that span CpG sequences which are immunostimulatory with complement directed segments that can stimulate apoptosis.

[0488] Personalized Multipartite Constructs

[0489] The oligonucleotide probe libraries of the invention can be used to construct personalized multipartite constructs. As an example, an oligonucleotide probe library can be used to probe a sample from a patient. The biomarker targets are identified for library members that preferentially recognize diseased cells, e.g., cancer cells, from the individual. Such methodology is described herein. See, e.g., Example 15. The variable region of one or more oligonucleotide probe to the patient's diseased cells is used to synthesize a multipartite construct of the invention. Such construct can be used as a personalized treatment for the patient. FIG. 16E illustrates a flow chart of this approach. An oligonucleotide probe library 1651 is contacted with patient sample 1652. The sample can be any useful patient sample, including without limitation tissue such as biopsy or tissue removed during surgical or other procedures, bodily fluids, frozen sections taken for histological purposes, cell cultures, and various embodiments, fractions, and components of any thereof as described herein. See, e.g., section entitled “Samples” above. Oligonucleotide probes that bind the patient sample are identified 1653. Methodology for identifying oligonucleotide probe members that bind a biological sample is described herein, and includes without limitation sequence analysis such as next generation sequencing, amplification and/or hybridization approaches. In an embodiment, flow sorting is used to separate diseased cells from the contacted patient sample and sorted and bound oligonucleotides are identified 1653. In an optional step, the biomarkers recognized by the oligonucleotide probe binders are identified 1654. This step can be optional as the target biomarker of a disease-specific oligonucleotide probe may not be necessary to synthesize a multipartite construct specific for the patient's disease. However, the identification of the target may assist in design of the multipartite construct. For example, identification of the target may allow computer modeling of the construct's in vivo interactions or help to select the most promising probe from multiple candidates, e.g., by avoiding toxicity associated with non-disease specific targets. The oligonucleotide probe binders are used to create a multipartite construct of the invention 1655. The multipartite construct can be as shown in FIG. 16A or variants thereof. In an embodiment, the variable region of an oligonucleotide probe binder is used as the variable region as shown in FIG. 16A. The multipartite construct can be administered to the patient 1656, thereby providing a personalized therapy for the patient. Further as noted in the figure, constructs comprising the variable region of an oligonucleotide probe binder can be used for other purposes, such as disease monitoring 1657. As an example of such methodology, the oligonucleotide probe binder can be used to detect the presence or absence of disease markers in the patient over time such as in an immunoassay format.

[0490] Anti-C1q Oligonucleotides

[0491] The complement system is a part of the immune system that enhances (complements) the ability of antibodies and phagocytic cells to clear microbes and damaged cells from an organism. It is part of the innate immune system, which is not adaptable and does not change over the course of an individual's lifetime. However, it can be recruited and brought into action by the adaptive immune system. Complement activation or fixation can stimulate phagocytes to clear foreign and damaged material, induce inflammation to attract additional phagocytes, and activate the cell-killing membrane attack complex. The “classical” complement pathway is triggered by activation of the C1-complex, which occurs when C1q binds to IgM or IgG complexed with antigens. The C1-complex is composed of 1 molecule of C1q, 2 molecules of C1r and 2 molecules of C1s, or C1qr₂s₂. Such immunoglobulin-mediated binding of the complement uses the ability of the immunoglobulin system to detect and bind to non-self antigens. C1q can also directly identify various structures and ligands on microbial surfaces and apoptotic cells, and binds additional self proteins including C-reactive protein (CRP), HIV-1, phosphatidylserine (PS), HTLV-1, and others. Because the complement system has the potential to be extremely damaging to host tissues, its activation must be tightly regulated. The classical pathway is inhibited by C1-inhibitor, which binds to C1 to prevent its activation. C1q also performs a number of non-complement functions, including without limitation such diverse functions as clearance of bacterial pathogens, induction of angiogenesis during wound healing, tolerance induction, anti-inflammatory responses and inhibiting T cell response. As a result of these diverse functions, complement and C1q play a role in diverse diseases and disorders, including without limitation autoimmune settings, pregnancy disorders, pathogen infection, aggregated proteins leading to neurodegenerative diseases, inflammation, and cancer. Deficiencies have been associated with autoimmune disease (e.g., systemic lupus erythematosus), pathogen infection and cancer. However, the tumor microenvironment may also hijack C1q to promote cell adhesion, migration and proliferation. See, e.g., Kouser et al., Emerging and Novel Functions of Complement Protein C1q, Front Immunol. 2015; 6: 317. Published online 2015 Jun. 29; Son et al., Fundamental role of C1q in autoimmunity and inflammation, Immunol Res. 2015 December; 63(1-3): 101-106; Ghebrehiwet et al., The C1q Family of Proteins: Insights into the Emerging Non-Traditional Functions, Front Immunol. 2012; 3: 52; Nayak et al., Complement and non-complement activating functions of C1q: a prototypical innate immune molecule. Innate Immun. 2012 April; 18(2):350-63.

[0492] C1q is a Ca2+ dependent hexameric complex comprised of 18 polypeptide chains, 6 of three different subunits (C1q A chain (P02745), C1q B chain (P02746), and C1q C chain (P02747)), that binds C1r and C1s to form the C1 complex, the first component in classical pathway of complement. C1q globular heads form a pattern recognition complex that binds to various targets, including without limitation clustered antigen-antibody Fc immune complexes (e.g., IgG, IgM), C-reactive protein (CRP), abnormal proteins (e.g., prion and beta-amyloid), apoptotic and secondary necrotic cells, phosphatidylserine and the surface of a subpopulation of microparticles in human plasma. Recognition of IgG and IgM on a cell surface can induce a complement cascade and lead to apoptosis. See, e.g., Kishore et al., C1q and tumor necrosis factor superfamily: modularity and versatility, TRENDS in Immunology 25 (2004) 551-561; Nayak et al., Complement and non-complement activating functions of C1q: a prototypical innate immune molecule, Innate Immunity 18 (2012) 350-363. Aptamer-biotin-C1q protein conjugates have been used to induce complement mediated cell death. See, e.g., Bruno, Aptamer-biotin-streptavidin-C1q complexes can trigger the classical complement pathway to kill cancer cells, In Vitro Cell Dev Biol—Animal (2010) 46:107-113.

[0493] C1q globular heads has been shown to bind DNA and recognize apoptotic cells. See, e.g., Paidassi et al., The lectin-like activity of human C1q and its implication in DNA and apoptotic cell recognition, FEBS Letters 582 (2008) 3111-3116; Navratil et al., The globular heads of C1q specifically recognize surface blebs of apoptotic vascular endothelial cells, J Immunol 166 (2001) 3231-3239. DNA binds C qA and activates the complement cascade without interfering with the ability of C1q to bind antibody Fc regions. See, e.g., Jiang et al., DNA binds and activates complement via residues 14-26 of the human C1q A chain, J Biol Chem 267 (1992) 25597-25601; Garlatti, et al. Cutting edge: C1q binds deoxyribose and heparan sulfate through neighboring sites of its recognition domain, J Immunol 185 (2010) 808-812.

[0494] C1q protein quantification has been used for disease monitoring and monoclonal antibody (mAb) production. For example, C1q mAb is used to coat ELISA plates to capture and quantitate immune complexes in clinical samples. Various companies sell diagnostic kits for immune complex detection and quantitation which are based on the ability of C1q to bind well to immune complexes, but to not bind significantly to monomeric immunoglobulins. Because the DNA recognition domain of C1q does not overlap with the Fc-recognition domain, a DNA based ELISA may further allow a more accurate quantitation of immune complex detection.

[0495] Example 22 herein presents identification of an anti-C1q oligonucleotide aptamers and describes various uses thereof. The aptamers to C q were identified via oligonucleotide probe analysis of plasma microvesicles followed by identification of oligonucleotide probe targets using gel electrophoresis and mass spectrometry analysis.

[0496] Anti-C1q aptamers of the invention can be used for multiple purposes. As described above, the invention provides a multipartite construct having a disease specific target oligonucleotide or antibody (Ab) that can recognize a target of interest and an immunomodulatory region. In an embodiment of the invention, the immunomodulatory region comprises the C1q aptamer. Such construct can act as an immunotherapeutic agent for targeted cell killing via recruitment of complement proteins and the downstream membrane attack complex (MAC). By linking the C1q aptamer segment to another segment that specifically binds to a target of interest (e.g., a biomarker present on a cell or microvesicle of interest), the construct can bring C1q into proximity of a target. See FIG. 16C, which illustrates a construct 1631 having a segment that recognizes a Marker of Interest 1632 on a Membrane 1633, and another segment that attracts the Complement system 1634. Such binding can cause a complement cascade and induce complement mediated cell killing. This approach can be applied in multiple setting, e.g., to recognize cancer cells, gram negative bacteria, and/or viral and/or parasitic infections. For example, an anti-CD20 specific oligonucleotide can be linked with an anti-C1q specific oligonucleotide. The linkage to create the oligonucleotide-oligonucleotide construct can include but is not limited to direct synthesis with a spacer between the two oligonucleotide recognition sites. Different biomarkers can be used as the target of interest, thereby directing the complement cascade to the various targets as desired. The spacer type and size can be configured based on steric hindrance between the target protein and the C1q protein/MAC complex. As noted above, the target specific oligonucleotides/Abs can be chosen to specically recognize various targets of interest, including but not limited to cancer cells, circulating tumor cells, immune cells (e.g., B-cells, T-cells, neutrophils, macrophage, dendritic cells) microvesicles, bacteria, viruses or parasites. In addition to C1q, the target of the complement specific oligonucleotide segment can include without limitation C1r, C1s, C1, C3a, C3b, C3d, C5a, C2, C4, and cytokines.

[0497] The multipartite construct of the invention can comprise a linear molecule, a circular molecule, and/or adopt various secondary structures. FIG. 16D illustrates a construct 1640 having a C1q recruiting domain 1641 (nucleotides 37-77) and a C-met targeting domain 1642 (nucleotides 1-36). As desired, the C1q recruiting domain 1641 can comprise an anti-C1q oligonucleotide sequence of the invention. See e.g., Example 22. As shown in the illustration, the C1q recruiting domain 1641 comprises a single stranded hairpin and a complementary base pairing region, and the C-met targeting domain 1642 comprises a complementary base pairing region and a region having a more complex secondary structure. Such structures can be estimated using available software programs such as Vienna or mfold (available at mfold.rit.albany.edu). Such structural estimates can also be used to design derivatives of the sequences, e.g., by substituting, adding or deleting nucleotides in order to increase or decrease melting temperature, facilitate additions of non-natural nucleotide analogs, direct chemical modification, and/or manipulate structure or other parameters.

[0498] The invention further provides a method of molecular profiling of patient specific autoantigens by identifying autoantigens bound to complement 1 (C1) in plasma. The invention also provides immunoassays that detect levels of C1q protein. Such assays can be any applicable immunoassay format using the anti-C1q oligonucleotide of the invention, including without limitation an oligonucleotide based ELISA, Western analysis, flow cytometry, or affinity isolation. The immunoassay can be applied to various settings, including without limitation: 1) monitor cancer patient specific immune responses before, during and after administration of immunosuppressing drugs for optimal treatment with chemotherapeutic agents; 2) monitor immune responses in patients with autoimmune disorders in response to administration of immunosuppressing drugs such as TNF blockers; 3) detect levels of C1q and/or anti-C1q autoantibodies in patients with systemic lupus erythematosus (SLE); 4) quantitative C1q assay for mAb biosimilar production to satisfy the EMA biosimilar antibody guidance measures; 5) a WHO secondary test as a companion test to mAb based ELISAs; 6) as a marker for apoptosis/secondary necrosis; and 7) a C1q test for research purposes.

[0499] The anti-C1q oligonucleotides of the invention can undergo various modifications such as described herein or known in the art. For example, modifications can be made to alter desired characteristics, including without limitation in vivo stability, specificity, affinity, avidity or nuclease susceptibility. Alterations to the half life may improve stability in vivo or may reduce stability to limit in vivo toxicity. Such alterations can include mutations, truncations or extensions. The 5′ and/or 3′ ends of the multipartite oligonucleotide constructs can be protected or deprotected to modulate stability as well. Modifications to improve in vivo stability, specificity, affinity, avidity or nuclease susceptibility or alter the half life to influence in vivo toxicity may be at the 5′ or 3′ end and include but are not limited to the following: locked nucleic acid (LNA) incorporation, unlocked nucleic acid (UNA) incorporation, phosphorothioate backbone instead of phosphodiester backbone, amino modifiers (i.e. C6-dT), dye conjugates (Cy dues, Fluorophores, etc), Biotinylation, PEG linkers, Click chemistry linkers, dideoxynucleotide end blockers, inverted end bases, cholesterol TEG or other lipid based labels. See, e.g., Campbell, M A and Wengel, J (2011). Locked vs. unlocked nucleic acids (LNA vs. UNA): contrasting structures work towards common therapeutic goals. Chem Soc Rev 40: 5680-5689; and Wahlestedt, C, Salmi, P, Good, L, Kela, J, Johnsson, T, Hokfelt, T et al. (2000). Potent and nontoxic antisense oligonucleotides containing locked nucleic acids. Proc Natl Acad Sci USA 97: 5633-5638; which publications are incorporated by reference herein in their entirety.

[0500] Aptamer C10.36

[0501] We reported that aptamer C10.36 (5′-CTAACCCCGGGTGTGGTGGGTGGGCAGGGGGGTTAG; SEQ ID NO. 4357) forms a G-quadruplex structure and is taken up by Burkitt's Lymphoma (Ramos) cells via a clathrin-mediated endocytotic pathway and that this aptamer is taken up by Ramos cells to a greater extent than other lymphoma derived cell lines (e.g., Jurkat, Raji, or P12). Opazo F, et al. (2015). Modular Assembly of Cell-targeting Devices Based on an Uncommon G-quadruplex Aptamer Molecular Therapy. Nucleic Acids 4, e251. Aptamer C10.36 comprises a central G rich region surrounded by flanking complementary strands. See Opazo et al. Aptamer C10.36 may be referred to as C10.36, aptamer C10.36, C10.36, or the like herein.

[0502] In an aspect, the invention provides an oligonucleotide comprising a sequence selected from any one of SEQ ID NOs. 4357-4368 or 4372-4407. In a preferred embodiment, the oligonucleotide comprises a sequence according to SEQ ID NO. 4357, i.e., the sequence of aptamer C10.36. The invention further provides an oligonucleotide having a substitution in aptamer C10.36 such as in SEQ ID NOs. 4372-4407. The sequence can comprise the central G rich region of C10.36 (i.e., nucleotides 9-25 of SEQ ID NO. 4357) surrounded by complementary flanking regions. The flanking regions can be any useful length, e.g., at least 1, 2, 3, 4, 5, 6, 7, 8, 9 or at least 10 nucleotides in length. See, e.g., Opazo et al. The aptamer sequence may also comprise additions and deletions. For example, at least 1, 2, 3, 4, 5, 6, 7, 8, 9 or at least 10 nucleotides may be inserted between the G rich region and the flanking regions as desired. Alternately, nucleotides may be deleted between the G rich region and the flanking regions as desired. Substitutions, additions and deletions in the sequence can be chosen such that the aptamer retains or improves upon desired such as stability, target recognition and G quadruplex structure. In a related aspect, the invention provides an oligonucleotide comprising a sequence selected from any one of SEQ ID NOs. 4357-4368 or 4372-4407, and a 5′ region with sequence 5′-CTAGCATGACTGCAGTACGT (SEQ ID NO. 131), a 3′ region with sequence 5′-CTGTCTCTTATACACATCTGACGCTGCCGACGA (SEQ ID NO. 132), or both.

[0503] The oligonucleotide of the invention can be capable of binding to a target in any of Table 29, Table 31, Table 32, Tables 39-41, Tables 46-49, Table 54, Tables 57-59, or a complex comprising such target therein. In some embodiments, the oligonucleotide is capable of regulating cellular expression of a gene in any one of Tables 50-53. In some embodiments, the oligonucleotide is capable of regulating splicing of a gene in Table 55. In some embodiments, the oligonucleotide is capable of regulating MYC function, MALAT1 function, or both. For example, the MYC function can be expression, downstream signaling, transcription regulation, histone acetylation, chromatin remodeling, DNA methylation, or any combination thereof. The oligonucleotide can be capable of binding to various cells, including without limitation to Ramos cells, Ramos 2G6.C10, MEC-1, SU-DHL-1 or non-Hodgkin's lymphoma (NHL) peripheral blood mononuclear cells (PBMCs). See, e.g., FIGS. 23H, FIG. 30. Furthermore, the oligonucleotide may be capable of killing certain cells, e.g., Ramos cells or SU-DHL-1 cells. The oligonucleotide can be capable of binding to a complex comprising a protein selected from the group consisting of PARP1, HIST1H1B, HIST1H1D, NCL, FBL, SFPQ, RPL12, ACTB, HIST1H4A, SSBP1, NONO, H2AFJ, and DDX21, or a complex, subunit or fragment thereof. The oligonucleotide can be capable of binding to a complex comprising a protein selected from the group consisting of Cluster of Actin, cytoplasmic 1; Nucleolin; Isoform C1 of Heterogeneous nuclear ribonucleoproteins C1/C2; splicing factor, proline- and glutamine-rich; histone H4; Histone H1.5; NHP2-like protein 1; heterogeneous nuclear ribonucleoproteins A2/B1; rRNA 2′-O-methyltransferase fibrillarin; ATP synthase subunit alpha, mitochondrial; Nucleolar RNA helicase 2/DDX21; 60S ribosomal protein L30; 60S ribosomal protein L26, or a complex, subunit or fragment thereof. In some embodiments, the oligonucleotide is capable of binding to Heterogeneous nuclear ribonucleoprotein U (hnRNP U), or a complex, subunit or fragment thereof. The oligonucleotide can be capable of binding to a protein, or a complex comprising such protein, selected from the group consisting of 60S ribosomal protein L11; Histone H1.2, H1.4, H1.3, H1.5; 40S ribosomal protein L11; Histone H4; Heterogeneous nuclear ribonucleoproteins; Histone H2A, H2B; ATP synthase subunit alpha, mitochondrial; rRNA 2′-O-methyltransferase fibrillarin P2; Heterogeneous nuclear ribonucleoprotein H; Nucleolin; and Heterogeneous nuclear ribonucleoprotein (HNRP U), or a complex, subunit or fragment thereof. The oligonucleotide can be capable of binding to cells comprising cell surface Cluster of Actin, cytoplasmic 1 (P60709), Nucleolin, Isoform C1 of Heterogeneous nuclear ribonucleoproteins C1/C2, splicing factor, proline- and glutamine-rich, histone H4, Histone H1.5, NHP2-like protein 1, heterogeneous nuclear ribonucleoproteins A2/B1, rRNA 2′-O-methyltransferase fibrillarin, ATP synthase subunit alpha, mitochondrial, Nucleolar RNA helicase 2/DDX21, 60S ribosomal protein L30, 60S ribosomal protein L26, or a complex, subunit or fragment thereof. The oligonucleotide can be capable of binding to cells comprising cell surface Nucleolin; RNA-binding motif protein, X chromosome; Ubiquitin-60S ribosomal protein L40; Heat shock cognate 71 kDa protein; Prohibitin; Heterologous nuclear ribonucleoprotein U; rRNA 2′-O-methyltransferase fibrillarin; RNA-binding protein 14; 78 kDa glucose-regulared protein; 60S ribosomal protein L22; Heterologous nuclear ribonucleoproteins C1/C2; Actin, cytoplasmic 2; Nucleophosmin; Heterologous nuclear ribonucleoprotein A1; Splicing factor, proline- and glutamine-rich; Histone H3.3, or a complex, subunit or fragment thereof. The oligonucleotide can be capable of binding to cells comprising cell surface Cluster of Actin, cytoplasmic 1 (P60709), Nucleolin, Isoform C1 of Heterogeneous nuclear ribonucleoproteins C1/C2, splicing factor, proline- and glutamine-rich, histone H4, Histone H1.5, NHP2-like protein 1, heterogeneous nuclear ribonucleoproteins A2/B1, rRNA 2′-O-methyltransferase fibrillarin, ATP synthase subunit alpha, mitochondrial, Nucleolar RNA helicase 2/DDX21, 60S ribosomal protein L30, 60S ribosomal protein L26, or a complex, subunit or fragment thereof. The oligonucleotide can be binding to cells comprising cell surface Calcyphosin-2; Heterogeneous nuclear ribonucleoprotein U; Non-POU domain-containing octamer-binding protein; Nucleolar RNA helicase 2; Poly [ADP-ribose] polymerase 1; Polyubiquitin-B; heterogeneous nuclear ribonucleoprotein r; Keratin, type 1 cytoskeletal 19, or a complex, subunit or fragment thereof. The oligonucleotide can be binding to cells comprising cell surface 60 kDa heat shock protein, mitochondrial; 78 kDa glucose-regulated protein; Histone H2B type F-S; Isoform 2 of Elongation factor 1-delta; RuvB-like 1; Isoform 2 of ATP synthase subunit alpha, mitochondrial; Prohibitin; Prohibitin-2, or a complex, subunit or fragment thereof. The oligonucleotide can be binding to cells comprising cell surface Nucleolin; histone H4; heterogeneous nuclear ribonucleoproteins A2/B1; Histone H2B type F-S; Heterogeneous nuclear ribonucleoprotein A1; Histone H1.5; 78 kDa glucose-regulated protein; 60 kDa heat shock protein, mitochondrial; Nucleolar RNA helicase 2; Actin, cytoplasmic 1; Ig mu chain C region; Isoform 4 of Interleukin enhancer-binding factor 3; RNA-binding motif protein, X chromosome; RNA-binding protein 14; Isoform 1 of RNA-binding protein Raly; small nuclear ribonucleoprotein sm d3; NHP2-like protein 1; 60S ribosomal protein L12; glyceraldehyde-3-phosphate dehydrogenase; Polyubiquitin-B; RNA-binding protein EWS; Signal recognition particle 14 kDa protein; Poly [ADP-ribose] polymerase 1; Isoform 2 of Heterogeneous nuclear ribonucleoprotein A/B; Polyadenylate-binding protein 1; RNA-binding protein FUS; Non-POU domain-containing octamer-binding protein; Heterogeneous nuclear ribonucleoprotein A0; Heterogeneous nuclear ribonucleoprotein U; Insulin-like growth factor 2 mRNA-binding protein 1; rRNA 2′-O-methyltransferase fibrillarin; Isoform 2 of Elongation factor 1-delta; RuvB-like 1; 60S ribosomal protein L22; Heterogeneous nuclear ribonucleoprotein M; Isoform 2 of Heterogeneous nuclear ribonucleoprotein K; Polymerase delta-interacting protein 3; Histone H1.4; Histone H1.5; Small nuclear ribonucleoprotein Sm D2; histone H2A type 1; Histone H2A type 2-B; Pre-mRNA-processing factor 19; Isoform 2 of Heterogeneous nuclear ribonucleoprotein D0; Single-stranded DNA-binding protein, mitochondrial; 40S ribosomal protein S3; heterogeneous nuclear ribonucleoprotein r; 60S ribosomal protein L23a; Calcyphosin-2; Heat shock cognate 71 kDa protein, or a complex, subunit or fragment thereof. In some embodiment, the oligonucleotide is capable of binding to cells comprising any of these proteins on their surface, including without limitation hnRNP U.

[0504] In a related aspect the invention provides an oligonucleotide aptamer that binds a target protein on the surface of a cell, wherein the binding to the cell results in alternative splicing patterns in the cell, cellular death, or both. In some embodiments, the target protein is part of a ribonucleoprotein or spliceosomal complex. In some embodiments, the target protein is heterologous nuclear ribonucleoprotein U (hnRNP U). In some embodiments, the target protein is selected from the proteins in any one of Table 29, Table 31, Table 32, Table 39, Table 40, Table 41, Tables 46-49, Table 54, Tables 57-59 or a complex comprising such protein therein.

[0505] The invention further provides an oligonucleotide comprising a nucleic acid sequence or a portion thereof that is at least 50, 55, 60, 65, 70, 75, 80, 85, 86, 86, 88, 89, 90, 95, 96, 97, 98, 99 or 100 percent homologous to an oligonucleotide sequence described above.

[0506] In another aspect, the invention provides a plurality of oligonucleotides comprising at least 1, 2, 3, 4, 5, 6, 7, 8, 9, 10, 11, 12, 13, 14, 15, 16, 17, 18, 19, 20, 25, 30, 40, 45, 50, 55, 60, 65, 70, 75, 80, 85, 90, 95, 100, 110, 120, 130, 140, 150, 160, 170, 180, 190, 200, 300, 400, 500, 600, 700, 800, 900, 1000, 2000, 3000, 4000, 5000, 6000, 7000, 8000, 9000, or at least 10000 different oligonucleotide sequences described above.

[0507] The oligonucleotide or the plurality of oligonucleotides provided by the invention may comprise a DNA, RNA, 2′-O-methyl or phosphorothioate backbone, or any combination thereof. The oligonucleotide or the plurality of oligonucleotides may comprise at least one of DNA, RNA, PNA, LNA, UNA, and any combination thereof.

[0508] In some embodiments, the oligonucleotide or the plurality of oligonucleotides comprises at least one functional modification selected from the group consisting of biotinylation, a non-naturally occurring nucleotide, a deletion, an insertion, an addition, and a chemical modification. The chemical modification can be chosen to modulate desired properties such as stability, capture, detection, or binding efficiency. In some embodiments, the chemical modification comprises at least one of C18, polyethylene glycol (PEG), PEG4, PEG6, PEG8, PEG12, and an SM(PEG)n crosslinker (Thermo Scientific, Rockford, lL USA). The oligonucleotide or plurality of oligonucleotides can be labeled. The oligonucleotide or plurality of oligonucleotides can be attached to a nanoparticle, liposome, gold, magnetic label, fluorescent label, light emitting particle, or radioactive label. The liposome or particle can incorporate desired entities such as chemotherapeutic agents or detectable labels. Other useful modifications are disclosed herein.

[0509] In an aspect, the invention provides an isolated oligonucleotide or plurality of oligonucleotides having a sequence as described above. In a related aspect, the invention provides a composition comprising such isolated oligonucleotide or plurality of oligonucleotides.

[0510] In some embodiments, the isolated oligonucleotide or at least one member of the plurality of oligonucleotides is capable of binding to Ramos cells, binding to SUDHL1 cells, binding to Ramos 2G6C10 cells, binding to MEC1 cells, killing Ramos cells, killing SUDHL1 cells, killing Ramos 2G6C10, binding to a target in any one of Table 29, Table 31, Table 32, Table 39, Table 40, Table 41, Tables 46-49, Table 54, Tables 57-59 or a complex comprising such target therein, binding Heterogeneous nuclear ribonucleoprotein U, modulating cell proliferation, regulating cellular expression of a gene in any one of Tables 50-53, regulating splicing of a gene in Table 55, regulating MYC function, MALAT1 function, or any combination thereof. Other capabilities of the oligonucleotide or at least one member of the plurality of oligonucleotides of the invention are disclosed in the Examples herein. In some embodiments, the isolated oligonucleotide or plurality of oligonucleotides is capable of binding to a cell surface splicing complex or cell surface ribonucleoprotein complex.

[0511] The oligonucleotide or plurality of oligonucleotides can be capable of modulating cell proliferation. In some embodiments, the oligonucleotide or plurality of oligonucleotides is capable of inducing apoptosis. The cell proliferation can be neoplastic or dysplastic growth. The cell proliferation can be that of cancer cells such as disclosed herein, including without limitation that of lymphoma, leukemia, renal carcinoma, sarcoma, hemangiopericytoma, melanoma, abdominal cancer, gastric cancer, colon cancer, cervical cancer, prostate cancer, pancreatic cancer, breast cancer, or non-small cell lung cancer. In certain embodiments, the cell proliferation is that of leukemia, lymphoma or renal carcinoma cells. Other appropriate types of cancers are disclosed herein.

[0512] In an aspect, the invention provides a method comprising synthesizing the at least one oligonucleotide or the plurality of oligonucleotides provided above. Techniques for synthesizing oligonucleotides are disclosed herein or are known in the art.

[0513] In another aspect, the invention provides a method comprising contacting a biological sample with the at least one oligonucleotide, the plurality of oligonucleotides, or composition as described above. The method can further comprise detecting a presence or level of at least one protein in any of Table 29, Table 31, Table 32, Table 39, Table 40, Table 41, Tables 46-49, Table 54, or Tables 57-59 in the biological sample that is bound by the at least one oligonucleotide or at least one member of the plurality of oligonucleotides. In some embodiments, the method further comprises detecting a presence or level of a hnRNP U protein or complex thereof in the biological sample that is bound by the at least one oligonucleotide or at least one member of the plurality of oligonucleotides. As used herein, “a complex thereof” indicates that the protein can be found within the complex. For example, hnRNP U may be found with a ribonucleoprotein complex. Relatedly, the method may further comprise detecting a presence or level of a cell population in the biological sample that is bound by the at least one oligonucleotide or at least one member of the plurality of oligonucleotides. For example, the cells may display a protein in any of Table 29, Table 31, Table 32, Table 39, Table 40, Table 41, Tables 46-49, Table 54, or Tables 57-59 on their surface. The cell population can be any desired population, including without limitation cells having or indicative of a disease or disorder, e.g., neoplastic, malignant, tumor, hyperplastic, or dysplastic cells. In some embodiments, the cell population comprises lymphoma, leukemia, renal carcinoma, sarcoma, hemangiopericytoma, melanoma, abdominal cancer, gastric cancer, colon cancer, cervical cancer, prostate cancer, pancreatic cancer, breast cancer, non-small cell lung cancer cells, or other cancer cells such as described herein.

[0514] The detecting step of the method may comprise detecting the at least one oligonucleotide or at least one member of the plurality of oligonucleotides. The presence or level of oligonucleotide serves as a proxy for the level of oligonucleotide's target. The oligonucleotides can be detecting using any desired technique such as described herein or known in the art, including without limitation at least one of sequencing, amplification, hybridization, gel electrophoresis, chromatography, and any combination thereof. Any useful sequencing method can be employed, including without limitation at least one of next generation sequencing, dye termination sequencing, pyrosequencing, and any combination thereof. In some embodiments, the detecting comprises transmission electron microscopy (TEM) of immunogold labeled oligonucleotides. In some embodiments, the detecting comprises confocal microscopy of fluor labeled oligonucleotides.

[0515] The detecting step of the method may comprise detecting the protein or cell using techniques described herein or known in the art for detecting proteins, including without limitation at least one of an immunoassay, enzyme immunoassay (EIA), enzyme-linked immunosorbent assay (ELISA), enzyme-linked oligonucleotide assay (ELONA), affinity isolation, immunoprecipitation, Western blot, gel electrophoresis, microscopy or flow cytometry.

[0516] In some embodiments of the method, the detected protein is associated with a microvesicle population. The method may further comprise isolating the microvesicle population prior to the contacting with the oligonucleotides, after the contacting, or both. The isolating may be in whole or in part. For example, the microvesicle population may be partially isolated from other components in the sample before or after contacting the sample with the oligonucleotide or plurality of oligonucleotides. The invention may use any appropriate techniques to isolate microvesicles. Various techniques of isolating microvesicles are disclosed herein or known in the art, including without limitation affinity purification, filtration, concentration, polymer precipitation, PEG precipitation, ultracentrifugation, a molecular crowding reagent, affinity selection, chromatography, or any combination thereof.

[0517] Any desired biological sample can be contacted with the oligonucleotide or plurality of oligonucleotides according to the invention. In various embodiments, the biological sample comprises a bodily fluid, tissue sample or cell culture. Any desired tissue or cell culture sample can be contacted. In some embodiments, the tissue or cell culture sample comprises lymphoma, leukemia, renal carcinoma, sarcoma, hemangiopericytoma, melanoma, abdominal cancer, gastric cancer, colon cancer, cervical cancer, prostate cancer, pancreatic cancer, breast cancer, or non-small cell lung cancer cells. Similarly, any appropriate bodily fluid can be contacted, such as those disclosed herein. In certain preferred embodiments, the bodily fluid comprises whole blood or a derivative or fraction thereof, such as sera or plasma. The bodily fluid may comprise cancer cells, including without limitation lymphoma, leukemia, renal carcinoma, sarcoma, hemangiopericytoma, melanoma, abdominal cancer, gastric cancer, colon cancer, cervical cancer, prostate cancer, pancreatic cancer, breast cancer, or non-small cell lung cancer cells.

[0518] The biological sample may be spiked with a purified or recombinant protein (or both). In some embodiments, such protein is selected from of Table 29, Table 31, Table 32, Tables 39-41, Tables 46-49, Table 54, or Tables 57-59, or complexes, subunits or fragments thereof. For example, the spiking can be used as a control in an assay.

[0519] As desired, the method of detecting the presence or level of the at least one oligonucleotide, the plurality of oligonucleotides, or composition bound to a target can be used to characterize a phenotype. The phenotype can be any appropriate phenotype, including without limitation a disease or disorder. In such cases, the characterizing may include providing, or assisting in providing, at least one of diagnostic, prognostic and theranostic information for the disease or disorder. Characterizing the phenotype may comprise comparing the presence or level to a reference. Any appropriate reference level can be used. For example, the reference can be the presence or level determined in a sample from at least one individual without the phenotype or from at least one individual with a different phenotype. As a further example, if the phenotype is a disease or disorder, the reference level may be the presence or level determined in a sample from at least one individual without the disease or disorder, or with a different state of the disease or disorder (e.g., in remission, different stage or grade, different prognosis, metastatic versus local, etc).

[0520] As noted, the sample can be from a subject suspected of having or being predisposed to a disease or disorder. The disease or disorder can be any disease or disorder that can be assessed by the subject method. For example, the disease or disorder may be a cancer, a premalignant condition, an inflammatory disease, an immune disease, an autoimmune disease or disorder, a cardiovascular disease or disorder, neurological disease or disorder, infectious disease or pain. In certain embodiments, the cancer is a cancer disclosed herein (see, e.g., Section “Phenotypes”), including without limitation lymphoma, leukemia, renal carcinoma, sarcoma, hemangiopericytoma, melanoma, abdominal cancer, gastric cancer, colon cancer, cervical cancer, prostate cancer, pancreatic cancer, breast cancer, or non-small cell lung cancer.

[0521] As further described herein, the invention provides a kit comprising a reagent for carrying out the method. Similarly, the invention provides for the use of a reagent for carrying out the method. The reagent can be any useful reagent for carrying out the method. For example, the reagent can be the at least one oligonucleotide or the plurality of oligonucleotides, one or more primer for amplification or sequencing of such oligonucleotides, at least one binding agent to at least one protein, a binding buffer with or without MgCl₂, a sample processing reagent, a microvesicle isolation reagent, a cell isolation reagent, a detection reagent, a secondary detection reagent, a wash buffer, an elution buffer, a solid support, and any combination thereof. The microvesicle isolation reagent may comprise at least one of a concentrator unit, a filtration unit, a polymer, PEG, a size exclusion column, a binding agent to a microvesicle antigen, and any combination thereof, and/or the detection or secondary detection agent comprises streptavidin-horse radish peroxide (HRP), a streptavidin-conjugated fluorophore, a streptavidin-conjugated quantum dot, and any combination thereof.

[0522] The G quadruplex aptamer AS1411 has been shown to decrease viability of a variety of cancer cell types and has undergone phase II clinical trials. See, e.g., Bates, P et al. (2009). Discovery and development of the G-rich oligonucleotide AS1411 as a novel treatment for cancer. Experimental and Molecular Pathology 86:151-164; Rosenberg J, et al. (2014). A phase II trial of the nucleolin-targeted DNA aptamer AS1411 in metastatic refractory renal cell carcinoma. Invest New Drugs 32:178-187, which references are incorporated by reference herein in their entirety. AS1411 is believed to bind the protein nucleolin, a nucleolar phosphoprotein which is overexpressed on the surface of certain cancer cells. AS 411 bound to surface nucleolin may be internalized and prevent nuclear nucielin from stabilizing BCL2 mRNA. Reduced levels of BCL2 may then lead to apoptosis. AS1411 has been used to create nucleolin targeted liposomes and nanoparticles for drug delivery to cancer cells. See, e.g., Wu et al. Nucleolin Targeting AS 1411 Modified Protein Nanoparticle for Antitumor Drugs Delivery, Mol. Pharmaceutics, 2013. 10 (10), pp 3555-3563; Li et al., Nucleolin-targeting liposomes guided by aptamer AS1411 for the delivery of siRNA for the treatment of malignant melanomas. Biomaterials 35: 3840-3850 (2014); Ai et al., Multifunctional AS 411-functionalized fluorescent gold nanoparticles for targeted cancer cell imaging and efficient photodynamic therapy, Talanta 118:54-60 (2014); Zhang et al. Nucleolin targeting AS 411 aptamer modified pH-sensitive micelles for enhanced delivery and antitumor efficacy of paclitaxel. Nano Research 2015 8, 201-218, AS141 has also been used as an imaging agent. See, e.g., Li et al., Aptamer imaging with Cu-64 labeled AS 141 i: Preliminary assessment in lung cancer, Nuc Med Biol, 41:179-185 (2014).

[0523] In an aspect, the invention provides a method of imaging a cell or tissue, comprising contacting the cell or tissue with at least one oligonucleotide or plurality of oligonucleotides as described above, e.g., aptamer C10.36, and detecting the oligonucleotides in contact with at least one cell or tissue. In some embodiments, the oligonucleotides are labeled, e.g., in order to facilitate detection or medical imaging. The oligonucleotides can be attached to a nanoparticle, liposome, gold, magnetic label, fluorescent label, light emitting particle, radioactive label, or other useful label such as disclosed herein or known in the art. The oligonucleotides can be administered to a subject prior to the detecting. The cell or tissue can comprise cells displaying hnRNP U or another protein from of Table 29, Table 31, Table 32, Tables 39-41, Tables 46-49, Table 54, or Tables 57-59 on their surface. In some embodiments, the cell or tissue comprises neoplastic, malignant, tumor, hyperplastic, or dysplastic cells. For example, the cell or tissue may comprise lymphoma, leukemia, renal carcinoma, sarcoma, hemangiopericytoma, melanoma, abdominal cancer, gastric cancer, colon cancer, cervical cancer, prostate cancer, pancreatic cancer, breast cancer, non-small cell lung cancer, or other cancer cells such as described herein.

[0524] In an aspect, the invention provides a pharmaceutical composition comprising a therapeutically effective amount of the C10.36 oligonucleotide aptamers, or a salt thereof, and a pharmaceutically acceptable carrier, diluent, or both. In some embodiments, the oligonucleotides are attached to a desired payload, e.g., a small molecule, drug, toxin, chemotherapeutic agent, or other agent useful for treating a disease or disorder. In some embodiments, the oligonucleotides are attached to a liposome or nanoparticle. The liposome or nanoparticle may comprise a desired payload, e.g., a small molecule, drug, toxin, chemotherapeutic agent, or other agent useful for treating a disease or disorder. In such embodiments, the at least one oligonucleotide or the plurality of oligonucleotides are used for targeted delivery of the desired payload.

[0525] In a related aspect, the invention provides a method of treating or ameliorating a disease or disorder in a subject in need thereof, comprising administering such pharmaceutical composition to the subject. In another related aspect, the invention provides a method of inducing cytotoxicity in a subject, comprising administering such pharmaceutical to the subject. The pharmaceutical composition can be administered in any useful format. In various embodiments, the administering comprises at least one of intradermal, intramuscular, intraperitoneal, intravenous, subcutaneous, intranasal, epidural, oral, sublingual, intracerebral, intravaginal, transdermal, rectal, by inhalation, topical administration, or any combination thereof. The carrier or diluent can be any useful carrier or diluent, as described herein or known in the art. As desired, the pharmaceutical composition can be administered in combination with additional known drugs, immunotherapies, antibodies, or chemotherapeutic agents such as described herein or known in the art, e.g., cyclophosphamide, etoposide, doxorubicin, methotrexate, vincristine, procabazine, prednisone, dexamethasone, tamoxifen citrate, carboplatin, cisplatin, oxaliplatin, 5-fluorouracil, camptothecin, zoledronic acid, Ibandronate or mytomicin. In another related aspect, the invention provides a method comprising detecting a transcript or protein in a biological sample from a subject, comparing a presence or level of the transcript to a reference, and administering the pharmaceutical composition above to the subject based on the comparison. In some embodiments, the transcript or protein is selected from any one of Table 29, Table 31, Table 32, Tables 39-41, Tables 46-55, or Tables 57-59. The administering can be through any useful methods such as described herein.

[0526] In an aspect, the invention provides nanoparticle conjugated to the at least one oligonucleotide or the plurality of oligonucleotides provided by the invention. In some embodiments, the nanoparticle comprises a useful payload, including without limitation a small molecule, drug, toxin or chemotherapeutic agent. The nanoparticle can be selected for desired properties. For example, if internalization inside a cell is desired, it may be preferred that the nanoparticle is ≤100 nm in diameter, e.g., ≤10 nm, ≤20 nm, ≤30 nm, ≤40 nm, ≤50 nm, ≤60 nm, ≤70 nm, ≤80 nm, ≤90 nm, or ≤100 nm in diameter. In other embodiments, the nanoparticle is ≥100 nm in diameter. In a related aspect, the invention provides a pharmaceutical composition comprising a therapeutically effective amount of the conjugated nanoparticle, and a pharmaceutically acceptable carrier, diluent, or both. In still another related aspect, the invention provides a method of treating or ameliorating a disease or disorder in a subject in need thereof, comprising administering the pharmaceutical composition to the subject. The invention further provides a method of inducing cytotoxicity in a subject, comprising administering the pharmaceutical composition to the subject. In another related aspect, the invention provides a method comprising detecting a transcript or protein in a biological sample from a subject, comparing a presence or level of the transcript to a reference, and administering the pharmaceutical composition to the subject based on the comparison. In some embodiments, the transcript or protein is selected from any one of Table 29, Table 31, Table 32, Tables 39-41, Tables 46-55, or Tables 57-59. The administering can be through any useful methods such as described herein.

[0527] In still another aspect, the invention provides a method of immune therapy comprising using a protein in any one of Table 29, Table 31, Table 32, Tables 39-41, Tables 46-54 or Tables 57-59 as a target for CAR-T therapy of a disease or disorder. The invention also provides a method of immune therapy comprising identifying a target of an oligonucleotide probe, and using the target for CAR-T therapy of a disease or disorder. The invention also provides method comprising identifying an oligonucleotide probe against an MHC loaded with a peptide. The identifying can be performed with MHC complexes on cells or using an in vitro system. The invention also provides a method comprising using an oligonucleotide probe against an MHC loaded with a peptide to detect or target the loaded MHC. As further described herein, the invention provides a kit comprising a reagent for carrying out the method. Similarly, the invention provides for the use of a reagent for carrying out the method. The reagent can be any useful reagent for carrying out the method. For example, the reagent may comprise one or more oligonucleotide probe, isolated MHC constructs, peptides of interest, and various buffers and the like for performing the method.

[0528] As further described herein, the invention provides reagents and kits for carrying out the methods described herein. For example, the invention provides for the use of a reagent for carrying out the analysis, detection, characterization, imaging, administering, monitoring, and treatments described above. The reagent can be any useful reagent for carrying out the method. For example, the reagent may comprise the pharmaceutical composition and/or items needed for the desired administration route. In some embodiments, the reagent comprises the at least one oligonucleotide or the plurality of oligonucleotides, one or more primer for amplification or sequencing of such oligonucleotides, at least one binding agent to at least one protein, a binding buffer with or without MgCl₂, a sample processing reagent, a microvesicle isolation reagent, a detection reagent, a secondary detection reagent, a wash buffer, an elution buffer, a solid support, and any combination thereof. The invention contemplates addition of additional useful reagents as desired.

[0529] As described above, the invention provides methods and compositions useful for analysis, detection, characterization, imaging, administering, monitoring, and treatment of various diseases and disorders. In various embodiments, the disease or disorder comprises a cancer, a premalignant condition, an inflammatory disease, an immune disease, an autoimmune disease or disorder, a cardiovascular disease or disorder, neurological disease or disorder, infectious disease or pain. The cancer can include without limitation one of acute lymphoblastic leukemia; acute myeloid leukemia; adrenocortical carcinoma; AIDS-related cancers; AIDS-related lymphoma; anal cancer; appendix cancer; astrocytomas; atypical teratoid/rhabdoid tumor; basal cell carcinoma; bladder cancer; brain stem glioma; brain tumor (including brain stem glioma, central nervous system atypical teratoid/rhabdoid tumor, central nervous system embryonal tumors, astrocytomas, craniopharyngioma, ependymoblastoma, ependymoma, medulloblastoma, medulloepithelioma, pineal parenchymal tumors of intermediate differentiation, supratentorial primitive neuroectodermal tumors and pineoblastoma); breast cancer; bronchial tumors; Burkitt lymphoma; cancer of unknown primary site; carcinoid tumor; carcinoma of unknown primary site; central nervous system atypical teratoid/rhabdoid tumor; central nervous system embryonal tumors; cervical cancer; childhood cancers; chordoma; chronic lymphocytic leukemia; chronic myelogenous leukemia; chronic myeloproliferative disorders; colon cancer; colorectal cancer; craniopharyngioma; cutaneous T-cell lymphoma; endocrine pancreas islet cell tumors; endometrial cancer; ependymoblastoma; ependymoma; esophageal cancer; esthesioneuroblastoma; Ewing sarcoma; extracranial germ cell tumor; extragonadal germ cell tumor; extrahepatic bile duct cancer; gallbladder cancer; gastric (stomach) cancer; gastrointestinal carcinoid tumor; gastrointestinal stromal cell tumor; gastrointestinal stromal tumor (GIST); gestational trophoblastic tumor; glioma; hairy cell leukemia; head and neck cancer; heart cancer; Hodgkin lymphoma; hypopharyngeal cancer; intraocular melanoma; islet cell tumors; Kaposi sarcoma; kidney cancer; Langerhans cell histiocytosis; laryngeal cancer; lip cancer; liver cancer; lung cancer; malignant fibrous histiocytoma bone cancer; medulloblastoma; medulloepithelioma; melanoma; Merkel cell carcinoma; Merkel cell skin carcinoma; mesothelioma; metastatic squamous neck cancer with occult primary; mouth cancer; multiple endocrine neoplasia syndromes; multiple myeloma; multiple myeloma/plasma cell neoplasm; mycosis fungoides; myelodysplastic syndromes; myeloproliferative neoplasms; nasal cavity cancer; nasopharyngeal cancer; neuroblastoma; Non-Hodgkin lymphoma; nonmelanoma skin cancer; non-small cell lung cancer; oral cancer; oral cavity cancer; oropharyngeal cancer; osteosarcoma; other brain and spinal cord tumors; ovarian cancer; ovarian epithelial cancer; ovarian germ cell tumor; ovarian low malignant potential tumor; pancreatic cancer; papillomatosis; paranasal sinus cancer; parathyroid cancer; pelvic cancer; penile cancer; pharyngeal cancer; pineal parenchymal tumors of intermediate differentiation; pineoblastoma; pituitary tumor; plasma cell neoplasm/multiple myeloma; pleuropulmonary blastoma; primary central nervous system (CNS) lymphoma; primary hepatocellular liver cancer; prostate cancer; rectal cancer; renal cancer; renal cell (kidney) cancer; renal cell cancer; respiratory tract cancer; retinoblastoma; rhabdomyosarcoma; salivary gland cancer; Sezary syndrome; small cell lung cancer; small intestine cancer; soft tissue sarcoma; squamous cell carcinoma; squamous neck cancer; stomach (gastric) cancer; supratentorial primitive neuroectodermal tumors; T-cell lymphoma; testicular cancer; throat cancer; thymic carcinoma; thymoma; thyroid cancer; transitional cell cancer; transitional cell cancer of the renal pelvis and ureter; trophoblastic tumor; ureter cancer; urethral cancer; uterine cancer; uterine sarcoma; vaginal cancer; vulvar cancer; Waldenstrom macroglobulinemia; or Wilm's tumor. The premalignant condition can include without limitation Barrett's Esophagus. The autoimmune disease can include without limitation one of inflammatory bowel disease (IBD), Crohn's disease (CD), ulcerative colitis (UC), pelvic inflammation, vasculitis, psoriasis, diabetes, autoimmune hepatitis, multiple sclerosis, myasthenia gravis, Type I diabetes, rheumatoid arthritis, psoriasis, systemic lupus erythematosis (SLE), Hashimoto's Thyroiditis, Grave's disease, Ankylosing Spondylitis Sjogrens Disease, CREST syndrome, Scleroderma, Rheumatic Disease, organ rejection, Primary Sclerosing Cholangitis, or sepsis. The cardiovascular disease can include without limitation one of atherosclerosis, congestive heart failure, vulnerable plaque, stroke, ischemia, high blood pressure, stenosis, vessel occlusion or a thrombotic event. The neurological disease can include without limitation one of Multiple Sclerosis (MS), Parkinson's Disease (PD), Alzheimer's Disease (AD), schizophrenia, bipolar disorder, depression, autism, Prion Disease, Pick's disease, dementia, Huntington disease (HD), Down's syndrome, cerebrovascular disease, Rasmussen's encephalitis, viral meningitis, neurospsychiatric systemic lupus erythematosus (NPSLE), amyotrophic lateral sclerosis, Creutzfeldt-Jacob disease, Gerstmann-Straussler-Scheinker disease, transmissible spongiform encephalopathy, ischemic reperfusion damage (e.g. stroke), brain trauma, microbial infection, or chronic fatigue syndrome. The pain can include without limitation one of fibromyalgia, chronic neuropathic pain, or peripheral neuropathic pain. The infectious disease can include without limitation one of a bacterial infection, viral infection, yeast infection, Whipple's Disease, Prion Disease, cirrhosis, methicillin-resistant Staphylococcus aureus, HIV, Hepatitis C virus (HCV), Epstein Barr virus, Helicobacter pylori, hepatitis, syphilis, meningitis, malaria, tuberculosis, or influenza.

[0530] Modifications

[0531] Modifications to the one or more oligonucleotide of the invention, e.g., a multipartite construct, an anti-C1Q oligonucleotide, a C10.36 oligonucleotide, or any combination thereof, can be made to alter desired characteristics, including without limitation in vivo stability, specificity, affinity, avidity or nuclease susceptibility. Alterations to the half life may improve stability in vivo or may reduce stability to limit in vivo toxicity. Such alterations can include mutations, truncations or extensions. The 5′ and/or 3′ ends of the multipartite oligonucleotide constructs can be protected or deprotected to modulate stability as well. Modifications to improve in vivo stability, specificity, affinity, avidity or nuclease susceptibility or alter the half life to influence in vivo toxicity may be at the 5′ or 3′ end and include but are not limited to the following: locked nucleic acid (LNA) incorporation, unlocked nucleic acid (UNA) incorporation, phosphorothioate backbone instead of phosphodiester backbone, amino modifiers (i.e. C6-dT), dye conjugates (Cy dues, Fluorophores, etc), Biotinylation, PEG linkers, Click chemistry linkers, dideoxynucleotide end blockers, inverted end bases, cholesterol TEG or other lipid based labels.

[0532] Linkage options for segments of the oligonucleotide of the invention can be on the 5′ or 3′ end of an oligonucleotide or to a primary amine, sulfhydryl or carboxyl group of an antibody and include but are not limited to the following: Biotin-target oligonucleotide/Ab, streptavidin-complement oligonucleotide or vice versa, amino modified-target Ab/oligonucleotide, thiol/carboxy-complement oligonucleotide or vice versa, Click chemistry-target Ab/oligonucleotide, corresponding Click chemistry partner-complement oligonucleotide or vice versa. The linkages may be covalent or non-covalent and may include but are not limited to monovalent, multivalent (i.e. bi, tri or tetra-valent) assembly, to a DNA scaffold (i.e. DNA origami structure), drug/chemotherapeutic agent, nanoparticle, microparticle or a micelle or liposome.

[0533] A linker region can comprise a spacer with homo- or multifunctional reactive groups that can vary in length and type. These include but are not limited to the following: spacer C18, PEG4, PEG6, PEG8, and PEG12.

[0534] The multipartite oligonucleotide of the invention can further comprise additional elements to add desired biological effects. For example, the oligonucleotide of the invention may comprise a membrane disruptive moiety. The oligonucleotide of the invention may also be conjugated to one or more chemical moiety that provides such effects. For example, the oligonucleotide of the invention may be conjugated to a detergent-like moiety to disrupt the membrane of a target cell or microvesicle. Useful ionic detergents include sodium dodecyl sulfate (SDS, sodium lauryl sulfate (SLS)), sodium laureth sulfate (SLS, sodium lauryl ether sulfate (SLES)), ammonium lauryl sulfate (ALS), cetrimonium bromide, cetrimonium chloride, cetrimonium stearate, and the like. Useful non-ionic (zwitterionic) detergents include polyoxyethylene glycols, polysorbate 20 (also known as Tween 20), other polysorbates (e.g., 40, 60, 65, 80, etc), Triton-X (e.g., X100, X114), 3-[(3-cholamidopropyl)dimethylammonio]-1-propanesulfonate (CHAPS), CHAPSO, deoxycholic acid, sodium deoxycholate, NP-40, glycosides, octyl-thio-glucosides, maltosides, and the like. One of skill will appreciate that functional fragments, such as membrane disruptive moieties, can be covalently or non-covalently attached to the oligonucleotide of the invention.

[0535] Oligonucleotide segments, including those of a multipartite construct, can include any desirable base modification known in the art. In certain embodiments, oligonucleotide segments are 10 to 50 nucleotides in length. One having ordinary skill in the art will appreciate that this embodies oligonucleotides of 10, 11, 12, 13, 14, 15, 16, 17, 18, 19, 20, 21, 22, 23, 24, 25, 26, 27, 28, 29, 30, 31, 32, 33, 34, 35, 36, 37, 38, 39, 40, 41, 42, 43, 44, 45, 46, 47, 48, 49, or 50 nucleotides in length, or any range derivable there within.

[0536] In certain embodiments, a multipartite construct comprises a chimeric oligonucleotide that contains two or more chemically distinct regions, each made up of at least one nucleotide. Such chimeras can be referred to using terms such as multipartite, multivalent, or the like. The oligonucleotides portions may contain at least one region of modified nucleotides that confers one or more beneficial properties, e.g., increased nuclease resistance, bioavailability, increased binding affinity for the target. Chimeric nucleic acids of the invention may be formed as composite structures of two or more oligonucleotides, two or more types of oligonucleotides (e.g., both DNA and RNA segments), modified oligonucleotides, oligonucleosides and/or oligonucleotide mimetics. Such compounds have also been referred to in the art as hybrids. Representative United States patents that teach the preparation of such hybrid structures comprise, but are not limited to, U.S. Pat. Nos. 5,013,830; 5,149,797; 5,220,007; 5,256,775; 5,366,878; 5,403,711; 5,491,133; 5,565,350; 5,623,065; 5,652,355; 5,652,356; and 5,700,922, each of which is herein incorporated by reference in its entirety.

[0537] In certain embodiments, an oligonucleotide of the invention comprises at least one nucleotide modified at the 2′ position of the sugar, including without limitation a 2′-0-alkyl, 2′-0-alkyl-0-alkyl or 2′-fluoro-modified nucleotide. In other embodiments, RNA modifications include 2′-fluoro, 2′-amino and 2′ O-methyl modifications on the ribose of pyrimidines, a basic residue or an inverted base at the 3′ end of the RNA. Such modifications are routinely incorporated into oligonucleotides and these oligonucleotides have been shown to have higher target binding affinity in some cases than 2′-deoxyoligonucleotides against a given target.

[0538] A number of nucleotide and nucleoside modifications have been shown to make an oligonucleotide more resistant to nuclease digestion, thereby prolonging in vivo half-life. Specific examples of modified oligonucleotides include those comprising backbones comprising, for example, phosphorothioates, phosphotriesters, methyl phosphonates, short chain alkyl or cycloalkyl intersugar linkages or short chain heteroatomic or heterocyclic intersugar linkages. The constructs of the invention can comprise oligonucleotides with phosphorothioate backbones and/or heteroatom backbones, e.g., CH2-NH—0-CH2, CH, ˜N(CH3)˜0˜CH2 (known as a methylene(methylimino) or MMI backbone], CH2-O—N (CH3)-CH2, CH2-N(CH3)-N(CH3)-CH2 and O—N(CH3)-CH2-CH2 backbones, wherein the native phosphodiester backbone is represented as O—P—O—CH,); amide backbones (De Mesmaeker et ah, 1995); morpholino backbone structures (Summerton and Weller, U.S. Pat. No. 5,034,506); peptide nucleic acid (PNA) backbone (wherein the phosphodiester backbone of the oligonucleotide is replaced with a polyamide backbone, the nucleotides being bound directly or indirectly to the aza nitrogen atoms of the polyamide backbone (Nielsen, et al., 1991), each of which is herein incorporated by reference in its entirety. Phosphorus-containing linkages include, but are not limited to, phosphorothioates, chiral phosphorothioates, phosphorodithioates, phosphotriesters, aminoalkylphosphotriesters, methyl and other alkyl phosphonates comprising 3′alkylene phosphonates and chiral phosphonates, phosphinates, phosphoramidates comprising 3′-amino phosphoramidate and aminoalkylphosphoramidates, thionophosphoramidates, thionoalkylphosphonates, thionoalkylphosphotriesters, and boranophosphates having normal 3′-5′ linkages, 2′-5′ linked analogs of these, and those having inverted polarity wherein the adjacent pairs of nucleoside units are linked 3*-5* to 5*-3* or 2*-5* to 5*-2*; see U.S. Pat. Nos. 3,687,808; 4,469,863; 4,476,301; 5,023,243; 5,177,196; 5,188,897; 5,264,423; 5,276,019; 5,278,302; 5,286,717; 5,321, 131; 5,399,676; 5,405,939; 5,453,496; 5,455, 233; 5,466,677; 5,476,925; 5,519,126; 5,536,821; 5,541,306; 5,550,111; 5,563, 253; 5,571,799; 5,587,361; and 5,625,050, each of which is herein incorporated by reference in its entirety. Morpholino-based oligomeric compounds are known in the art described in Braasch & Corey, Biochemistry vol. 41, no. 14, 2002, pages 4503-4510; Genesis vol. 30, 2001, page 3; Heasman, J. Dev. Biol. vol. 243, 2002, pages 209-214; Nasevicius et al. Nat. Genet. vol. 26, 2000, pages 216-220; Lacerra et al. Proc. Natl. Acad. Sci. vol. 97, 2000, pages 9591-9596 and U.S. Pat. No. 5,034,506, issued Jul. 23, 1991, each of which is herein incorporated by reference in its entirety. Cyclohexenyl nucleic acid oligonucleotide mimetics are described in Wang et al., J. Am. Chem. Soc. Vol. 122, 2000, pages 8595-8602, the contents of which is incorporated herein in its entirety. An oligonucleotide of the invention can comprise at least such modification as desired.

[0539] Modified oligonucleotide backbones that do not include a phosphorus atom therein have backbones that can be formed by short chain alkyl or cycloalkyl internucleoside linkages, mixed heteroatom and alkyl or cycloalkyl internucleoside linkages, or one or more short chain heteroatomic or heterocyclic internucleoside linkages. These comprise those having morpholino linkages (formed in part from the sugar portion of a nucleoside); siloxane backbones; sulfide, sulfoxide and sulfone backbones; formacetyl and thioformacetyl backbones; methylene formacetyl and thioformacetyl backbones; alkene containing backbones; sulfamate backbones; methyleneimino and methylenehydrazino backbones; sulfonate and sulfonamide backbones; amide backbones; and others having mixed N, O, S and CH2 component parts; see U.S. Pat. Nos. 5,034,506; 5,166,315; 5,185,444; 5,214,134; 5,216, 141; 5,235,033; 5,264,562; 5,264,564; 5,405,938; 5,434,257; 5,466,677; 5,470,967; 5,489,677; 5,541,307; 5,561,225; 5,596,086; 5,602,240; 5,610,289; 5,602,240; 5,608,046; 5,610,289; 5,618,704; 5,623,070; 5,663,312; 5,633,360; 5,677,437; and 5,677,439, each of which is herein incorporated by reference in its entirety. An oligonucleotide of the invention can comprise at least such modification as desired.

[0540] In certain embodiments, an oligonucleotide of the invention comprises one or more substituted sugar moieties, e.g., one of the following at the 2′ position: OH, SH, SCH₃, F, OCN, OCH₃OCH₃, OCH₃O(CH₂)n CH₃, O(CH₂)n NH₂ or O(CH₂)n CH₃ where n is from 1 to about 10; Ci to CIO lower alkyl, alkoxyalkoxy, substituted lower alkyl, alkaryl or aralkyl; CI; Br; CN; CF₃; OCF₃; O-, S-, or N-alkyl; O-, S-, or N-alkenyl; SOCH₃; SO₂CH₃; ONO₂; N O₂; N₃; NH₂; heterocycloalkyl; heterocycloalkaryl; aminoalkylamino; polyalkylamino; substituted silyl; an RNA cleaving group; a reporter group; an intercalator; a group for improving the pharmacokinetic properties of an oligonucleotide; or a group for improving the pharmacokinetic/pharmacodynamic properties of an oligonucleotide and other substituents having similar properties. A preferred modification includes 2′-methoxyethoxy [2′-0-CH2CH2OCH3, also known as 2′-0-(2-methoxyethyl)]. Other preferred modifications include 2*-methoxy (2*-0-CH3), 2*-propoxy (2*-OCH2 CH2CH3) and 2*-fluoro (2*-F). Similar modifications may also be made at other positions on the oligonucleotide, e.g., the 3′ position of the sugar on the 3′ terminal nucleotide and the 5′ position of 5′ terminal nucleotide. Oligonucleotides may also have sugar mimetics such as cyclobutyls in place of the pentofuranosyl group.

[0541] In certain embodiments, an oligonucleotide of the invention comprises one or more base modifications and/or substitutions. As used herein, “unmodified” or “natural” bases include adenine (A), guanine (G), thymine (T), cytosine (C) and uracil (U). Modified bases include, without limitation, bases found only infrequently or transiently in natural nucleic acids, e.g., hypoxanthine, 6-methyladenine, 5-Me pyrimidines, particularly 5-methylcytosine (also referred to as 5-methyl-2′ deoxy cytosine and often referred to in the art as 5-Me-C), 5-hydroxymethylcytosine (HMC), glycosyl HMC and gentobiosyl HMC, as well as synthetic bases, e.g., 2-aminoadenine, 2-(methylamino)adenine, 2-(imidazolylalkyl)adenine, 2-(aminoalklyamino)adenine or other heterosubstituted alkyladenines, 2-thiouracil, 2-thiothymine, 5-bromouracil, 5-hydroxymethyluracil, 8-azaguanine, 7-deazaguanine, N6 (6-aminohexyl)adenine and 2,6-diaminopurine (Kornberg, 1980; Gebeyehu, et ah, 1987). A “universal” base known in the art, e.g., inosine, can also be included. 5-Me-C substitutions can also be included. These have been shown to increase nucleic acid duplex stability by 0.6-1.20C. See, e.g., Sanghvi et al., ‘Antisense Research & Applications’, 1993, CRC PRESS pages 276-278. Further suitable modified bases are described in U.S. Pat. No. 3,687,808, as well as U.S. Pat. Nos. 4,845,205; 5,130,302; 5,134,066; 5,175,273; 5,367,066; 5,432,272; 5,457,187; 5,459,255; 5,484,908; 5,502,177; 5,525,711; 5,552,540; 5,587,469; 5,596,091; 5,614,617; 5,750,692, and 5,681,941, each of which is herein incorporated by reference.

[0542] It is not necessary for all positions in a given oligonucleotide to be uniformly modified, and in fact more than one of the aforementioned modifications may be incorporated in a single oligonucleotide or even at within a single nucleoside within an oligonucleotide.

[0543] In certain embodiments, both a sugar and an internucleoside linkage, i.e., the backbone, of one or more nucleotide units within an oligonucleotide of the invention are replaced with novel groups. The base can be maintained for hybridization with an appropriate nucleic acid target compound. One such oligomeric compound, an oligonucleotide mimetic that has been shown to retain hybridization properties, is referred to as a peptide nucleic acid (PNA). In PNA compounds, the sugar-backbone of an oligonucleotide is replaced with an amide containing backbone, for example, an aminoethylglycine backbone. The nucleobases are retained and are bound directly or indirectly to aza nitrogen atoms of the amide portion of the backbone. Representative patents that teach the preparation of PNA compounds comprise, but are not limited to, U.S. Pat. Nos. 5,539,082; 5,714,331; and 5,719,262, each of which is herein incorporated by reference. Further teaching of PNA compounds can be found in Nielsen et al. Science vol. 254, 1991, page 1497, which is herein incorporated by reference.

[0544] In certain embodiments, the oligonucleotide of the invention is linked (covalently or non-covalently) to one or more moieties or conjugates that enhance activity, cellular distribution, or localization. Such moieties include, without limitation, lipid moieties such as a cholesterol moiety (Letsinger et al. Proc. Natl. Acad. Sci. Usa. vol. 86, 1989, pages 6553-6556), cholic acid (Manoharan et al. Bioorg. Med. Chem. Let. vol. 4, 1994, pages 1053-1060), a thioether, e.g., hexyl-S-tritylthiol (Manoharan et al. Ann. N. Y. Acad. Sci. Vol. 660, 1992, pages 306-309; Manoharan et al. Bioorg. Med. Chem. Let. vol. 3, 1993, pages 2765-2770), a thiocholesterol (Oberhauser et al. Nucl. Acids Res. vol. 20, 1992, pages 533-538), an aliphatic chain, e.g., dodecandiol or undecyl residues (Kabanov et al. Febs Lett. vol. 259, 1990, pages 327-330; Svinarchuk et al. Biochimie. vol. 75, 1993, pages 49-54), a phospholipid, e.g., di-hexadecyl-rac-glycerol or triethylammonium 1,2-di-O-hexadecyl-rac-glycero-3-H-phosphonate (Manoharan et al. Tetrahedron Lett. vol. 36, 1995, pages 3651-3654; Shea et al. Nucl. Acids Res. vol. 18, 1990, pages 3777-3783), a polyamine or a polyethylene glycol chain (Mancharan et al. Nucleosides & Nucleotides vol. 14, 1995, pages 969-973), or adamantane acetic acid (Manoharan et al. Tetrahedron Lett. vol. 36, 1995, pages 3651-3654), a palmityl moiety (Mishra et al. Biochim. Biophys. Acta vol. 1264, 1995, pages 229-237), or an octadecylamine or hexylamino-carbonyl-t oxycholesterol moiety (Crooke et al. J. Pharmacol. Exp. Ther. vol. 277, 1996, pages 923-937), each of which is herein incorporated by reference in its entirety. See also U.S. Pat. Nos. 4,828,979; 4,948,882; 5,218,105; 5,525,465; 5,541,313; 5,545,730; 5,552,538; 5,578,717; 5,580,731; 5,580,731; 5,591,584; 5,109,124; 5,118,802; 5,138,045; 5,414,077; 5,486,603; 5,512,439; 5,578,718; 5,608,046; 4,587,044; 4,605,735; 4,667,025; 4,762,779; 4,789,737; 4,824,941; 4,835,263; 4,876,335; 4,904,582; 4,958,013; 5,082,830; 5,112,963; 5,214,136; 5,082,830; 5,112,963; 5,214,136; 5,245,022; 5,254,469; 5,258,506; 5,262,536; 5,272,250; 5,292,873; 5,317,098; 5,371,241, 5,391,723; 5,416,203, 5,451,463; 5,510,475; 5,512,667; 5,514,785; 5,565,552; 5,567,810; 5,574,142; 5,585,481; 5,587,371; 5,595,726; 5,597,696; 5,599,923; 5,599,928 and 5,688,941, each of which is herein incorporated by reference in its entirety.

[0545] The oligonucleotide of the invention can be modified to incorporate a wide variety of modified nucleotides as desired. For example, the construct may be synthesized entirely of modified nucleotides or with a subset of modified nucleotides. The modifications can be the same or different. Some or all nucleotides may be modified, and those that are modified may contain the same modification. For example, all nucleotides containing the same base may have one type of modification, while nucleotides containing other bases may have different types of modification. All purine nucleotides may have one type of modification (or are unmodified), while all pyrimidine nucleotides have another, different type of modification (or are unmodified). Thus, the construct may comprise any combination of desired modifications, including for example, ribonucleotides (2′-OH), deoxyribonucleotides (2′-deoxy), 2′-amino nucleotides (2′-NH2), 2′-fluoro nucleotides (2′-F) and 2′-0-methyl (2′-OMe) nucleotides.

[0546] In some embodiments, the oligonucleotide of the invention is synthesized using a transcription mixture containing modified nucleotides in order to generate a modified construct. For example, a transcription mixture may contain only 2′-OMe A, G, C and U and/or T triphosphates (2′-OMe ATP, 2′-OMe UTP and/or 2*-OMe TTP, 2*-OMe CTP and 2*-OMe GTP), referred to as an MNA or mRmY mixture. Oligonucleotides generated therefrom are referred to as MNA oligonucleotides or mRmY oligonucleotides and contain only 2′-0-methyl nucleotides. A transcription mixture containing all 2′-OH nucleotides is referred to as an “rN” mixture, and oligonucleotides generated therefrom are referred to as “rN”, “rRrY” or RNA oligonucleotides. A transcription mixture containing all deoxy nucleotides is referred to as a “dN” mixture, and oligonucleotides generated therefrom are referred to as “dN”, “dRdY” or DNA oligonucleotides. Alternatively, a subset of nucleotides (e.g., C, U and/or T) may comprise a first modified nucleotides (e.g., 2′-OMe) nucleotides and the remainder (e.g., A and G) comprise a second modified nucleotide (e.g., 2′-OH or 2′-F). For example, a transcription mixture containing 2′-F U and 2′-OMe A, G and C is referred to as a “fUmV” mixture, and oligonucleotides generated therefrom are referred to as “fUmV” oligonucleotides. A transcription mixture containing 2′-F A and G, and 2′-OMe C and U and/or T is referred to as an “fRmY” mixture, and oligonucleotides generated therefrom are referred to as “fRmY” oligonucleotides. A transcription mixture containing 2′-F A and 2′-OMe C, G and U and/or T is referred to as “fAmB” mixture, and oligonucleotides generated therefrom are referred to as “fAmB” oligonucleotides.

[0547] One of skill in the art can improve pre-identified aptamer segments (e.g., variable regions or immunomodulatory regions that comprise an aptamer to a biomarker target or other entity) using various process modifications. Examples of such process modifications include, but are not limited to, truncation, deletion, substitution, or modification of a sugar or base or internucleotide linkage, capping, and PEGylation. In addition, the sequence requirements of an aptamer may be explored through doped reselections or aptamer medicinal chemistry. Doped reselections are carried out using a synthetic, degenerate pool that has been designed based on the aptamer of interest. The level of degeneracy usually varies from about 70-85% from the aptamer of interest. In general, sequences with neutral mutations are identified through the doped reselection process. Aptamer medicinal chemistry is an aptamer improvement technique in which sets of variant aptamers are chemically synthesized. These variants are then compared to each other and to the parent aptamer. Aptamer medicinal chemistry is used to explore the local, rather than global, introduction of substituents. For example, the following modifications may be introduced: modifications at a sugar, base, and/or internucleotide linkage, such as 2′-deoxy, 2′-ribo, or 2′-0-methyl purines or pyrimidines, phosphorothioate linkages may be introduced between nucleotides, a cap may be introduced at the 5′ or 3′ end of the aptamer (such as 3′ inverted dT cap) to block degradation by exonucleases, or a polyethylene glycol (PEG) element may be added to the aptamer to increase the half-life of the aptamer in the subject.

[0548] Additional compositions comprising an oligonucleotide of the invention and uses thereof are further described below.

[0549] Pharmaceutical Compositions

[0550] In an aspect, the invention provides pharmaceutical compositions comprising one or more oligonucleotide of the invention, e.g., a multipartite construct, an anti-C1Q oligonucleotide, a C10.36 oligonucleotide, as described above, or any combination thereof. The invention further provides methods of administering such compositions.

[0551] The term “condition,” as used herein means an interruption, cessation, or disorder of a bodily function, system, or organ. Representative conditions include, but are not limited to, diseases such as cancer, inflammation, diabetes, and organ failure.

[0552] The phrase “treating,” “treatment of,” and the like include the amelioration or cessation of a specified condition.

[0553] The phrase “preventing,” “prevention of,” and the like include the avoidance of the onset of a condition.

[0554] The term “salt,” as used herein, means two compounds that are not covalently bound but are chemically bound by ionic interactions.

[0555] The term “pharmaceutically acceptable,” as used herein, when referring to a component of a pharmaceutical composition means that the component, when administered to an animal, does not have undue adverse effects such as excessive toxicity, irritation, or allergic response commensurate with a reasonable benefit/risk ratio. Accordingly, the term “pharmaceutically acceptable organic solvent,” as used herein, means an organic solvent that when administered to an animal does not have undue adverse effects such as excessive toxicity, irritation, or allergic response commensurate with a reasonable benefit/risk ratio. Preferably, the pharmaceutically acceptable organic solvent is a solvent that is generally recognized as safe (“GRAS”) by the United States Food and Drug Administration (“FDA”). Similarly, the term “pharmaceutically acceptable organic base,” as used herein, means an organic base that when administered to an animal does not have undue adverse effects such as excessive toxicity, irritation, or allergic response commensurate with a reasonable benefit/risk ratio.

[0556] The phrase “injectable” or “injectable composition,” as used herein, means a composition that can be drawn into a syringe and injected subcutaneously, intraperitoneally, or intramuscularly into an animal without causing adverse effects due to the presence of solid material in the composition. Solid materials include, but are not limited to, crystals, gummy masses, and gels. Typically, a formulation or composition is considered to be injectable when no more than about 15%, preferably no more than about 10%, more preferably no more than about 5%, even more preferably no more than about 2%, and most preferably no more than about 1% of the formulation is retained on a 0.22 m filter when the formulation is filtered through the filter at 98° F. There are, however, some compositions of the invention, which are gels, that can be easily dispensed from a syringe but will be retained on a 0.22 μm filter. In one embodiment, the term “injectable,” as used herein, includes these gel compositions. In one embodiment, the term “injectable,” as used herein, further includes compositions that when warmed to a temperature of up to about 40° C. and then filtered through a 0.22 m filter, no more than about 15%, preferably no more than about 10%, more preferably no more than about 5%, even more preferably no more than about 2%, and most preferably no more than about 1% of the formulation is retained on the filter. In one embodiment, an example of an injectable pharmaceutical composition is a solution of a pharmaceutically active compound (for example, one or more oligonucleotide of the invention, e.g., a multipartite construct, an anti-C1Q oligonucleotide, a C10.36 oligonucleotide, as described above, or any combination thereof) in a pharmaceutically acceptable solvent. One of skill will appreciate that injectable solutions have inherent properties, e.g., sterility, pharmaceutically acceptable excipients and free of harmful measures of pyrogens or similar contaminants.

[0557] The term “solution,” as used herein, means a uniformly dispersed mixture at the molecular or ionic level of one or more substances (solute), in one or more other substances (solvent), typically a liquid.

[0558] The term “suspension,” as used herein, means solid particles that are evenly dispersed in a solvent, which can be aqueous or non-aqueous.

[0559] The term “animal,” as used herein, includes, but is not limited to, humans, canines, felines, equines, bovines, ovines, porcines, amphibians, reptiles, and avians. Representative animals include, but are not limited to a cow, a horse, a sheep, a pig, an ungulate, a chimpanzee, a monkey, a baboon, a chicken, a turkey, a mouse, a rabbit, a rat, a guinea pig, a dog, a cat, and a human. In one embodiment, the animal is a mammal. In one embodiment, the animal is a human. In one embodiment, the animal is a non-human. In one embodiment, the animal is a canine, a feline, an equine, a bovine, an ovine, or a porcine.

[0560] The phrase “drug depot,” as used herein means a precipitate, which includes one or more oligonucleotide of the invention, e.g., a multipartite construct, an anti-C1Q oligonucleotide, a C10.36 oligonucleotide, as described above, or any combination thereof, formed within the body of a treated animal that releases the oligonucleotide over time to provide a pharmaceutically effective amount of the oligonucleotide.

[0561] The phrase “substantially free of,” as used herein, means less than about 2 percent by weight. For example, the phrase “a pharmaceutical composition substantially free of water” means that the amount of water in the pharmaceutical composition is less than about 2 percent by weight of the pharmaceutical composition.

[0562] The term “effective amount,” as used herein, means an amount sufficient to treat or prevent a condition in an animal.

[0563] The nucleotides that make up the oligonucleotide of the invention can be modified to, for example, improve their stability, i.e., improve their in vivo half-life, and/or to reduce their rate of excretion when administered to an animal. The term “modified” encompasses nucleotides with a covalently modified base and/or sugar. For example, modified nucleotides include nucleotides having sugars which are covalently attached to low molecular weight organic groups other than a hydroxyl group at the 3′ position and other than a phosphate group at the 5′ position. Modified nucleotides may also include 2′ substituted sugars such as 2′-O-methyl-; 2′-O-alkyl; 2′-O-allyl; 2′-S-alkyl; 2′-S-allyl; 2′-fluoro-; 2′-halo or 2′-azido-ribose; carbocyclic sugar analogues; α-anomeric sugars; and epimeric sugars such as arabinose, xyloses or lyxoses, pyranose sugars, furanose sugars, and sedoheptulose.

[0564] Modified nucleotides are known in the art and include, but are not limited to, alkylated purines and/or pyrimidines; acylated purines and/or pyrimidines; or other heterocycles. These classes of pyrimidines and purines are known in the art and include, pseudoisocytosine; N4,N4-ethanocytosine; 8-hydroxy-N6-methyladenine; 4-acetylcytosine, 5-(carboxyhydroxylmethyl) uracil; 5-fluorouracil; 5-bromouracil; 5-carboxymethylaminomethyl-2-thiouracil; 5-carboxymethylaminomethyl uracil; dihydrouracil; inosine; N6-isopentyl-adenine; 1-methyladenine; 1-methylpseudouracil; 1-methylguanine; 2,2-dimethylguanine; 2-methyladenine; 2-methylguanine; 3-methylcytosine; 5-methylcytosine; N6-methyladenine; 7-methylguanine; 5-methylaminomethyl uracil; 5-methoxy amino methyl-2-thiouracil; β-D-mannosylqueosine; 5-methoxycarbonylmethyluracil; 5-methoxyuracil; 2 methylthio-N6-isopentenyladenine; uracil-5-oxyacetic acid methyl ester; psueouracil; 2-thiocytosine; 5-methyl-2 thiouracil, 2-thiouracil; 4-thiouracil; 5-methyluracil; N-uracil-5-oxyacetic acid methylester; uracil 5-oxyacetic acid; queosine; 2-thiocytosine; 5-propyluracil; 5-propylcytosine; 5-ethyluracil; 5-ethylcytosine; 5-butyluracil; 5-pentyluracil; 5-pentylcytosine; and 2,6,-diaminopurine; methylpsuedouracil; 1-methylguanine; and 1-methylcytosine.

[0565] An oligonucleotide of the invention can also be modified by replacing one or more phosphodiester linkages with alternative linking groups. Alternative linking groups include, but are not limited to embodiments wherein P(O)O is replaced by P(O)S, P(S)S, P(O)NR2, P(O)R, P(O)OR′, CO, or CH2, wherein each R or R′ is independently H or a substituted or unsubstituted C1-C20 alkyl. A preferred set of R substitutions for the P(O)NR2 group are hydrogen and methoxyethyl. Linking groups are typically attached to each adjacent nucleotide through an —O— bond, but may be modified to include —N— or —S— bonds. Not all linkages in an oligomer need to be identical.

[0566] The oligonucleotide of the invention can also be modified by conjugation to a polymer, for example, to reduce the rate of excretion when administered to an animal. For example, the oligonucleotide can be “PEGylated,” i.e., conjugated to polyethylene glycol (“PEG”). In one embodiment, the PEG has an average molecular weight ranging from about 20 kD to 80 kD. Methods to conjugate an oligonucleotide with a polymer, such PEG, are known to those skilled in the art (See, e.g., Greg T. Hermanson, Bioconjugate Techniques, Academic Press, 1966).

[0567] The oligonucleotide of the invention, e.g., a multipartite construct, an anti-C1Q oligonucleotide, a C10.36 oligonucleotide, as described above, or any combination thereof, can be used in the pharmaceutical compositions disclosed herein or known in the art.

[0568] In one embodiment, the pharmaceutical composition further comprises a solvent.

[0569] In one embodiment, the solvent comprises water.

[0570] In one embodiment, the solvent comprises a pharmaceutically acceptable organic solvent. Any useful and pharmaceutically acceptable organic solvents can be used in the compositions of the invention.

[0571] In one embodiment, the pharmaceutical composition is a solution of the salt in the pharmaceutically acceptable organic solvent.

[0572] In one embodiment, the pharmaceutical composition comprises a pharmaceutically acceptable organic solvent and further comprises a phospholipid, a sphingomyelin, or phosphatidyl choline. Without wishing to be bound by theory, it is believed that the phospholipid, sphingomyelin, or phosphatidyl choline facilitates formation of a precipitate when the pharmaceutical composition is injected into water and can also facilitate controlled release of the oligonucleotide from the resulting precipitate. Typically, the phospholipid, sphingomyelin, or phosphatidyl choline is present in an amount ranging from greater than 0 to 10 percent by weight of the pharmaceutical composition. In one embodiment, the phospholipid, sphingomyelin, or phosphatidyl choline is present in an amount ranging from about 0.1 to 10 percent by weight of the pharmaceutical composition. In one embodiment, the phospholipid, sphingomyelin, or phosphatidyl choline is present in an amount ranging from about 1 to 7.5 percent by weight of the pharmaceutical composition. In one embodiment, the phospholipid, sphingomyelin, or phosphatidyl choline is present in an amount ranging from about 1.5 to 5 percent by weight of the pharmaceutical composition. In one embodiment, the phospholipid, sphingomyelin, or phosphatidyl choline is present in an amount ranging from about 2 to 4 percent by weight of the pharmaceutical composition.

[0573] The pharmaceutical compositions can optionally comprise one or more additional excipients or additives to provide a dosage form suitable for administration to an animal. When administered to an animal, the oligonucleotide containing pharmaceutical compositions are typically administered as a component of a composition that comprises a pharmaceutically acceptable carrier or excipient so as to provide the form for proper administration to the animal. Suitable pharmaceutical excipients are described in Remington's Pharmaceutical Sciences 1447-1676 (Alfonso R. Gennaro ed., 19th ed. 1995), incorporated herein by reference. The pharmaceutical compositions can take the form of solutions, suspensions, emulsion, tablets, pills, pellets, capsules, capsules containing liquids, powders, suppositories, emulsions, aerosols, sprays, suspensions, or any other form suitable for use.

[0574] In one embodiment, the pharmaceutical compositions are formulated for intravenous or parenteral administration. Typically, compositions for intravenous or parenteral administration comprise a suitable sterile solvent, which may be an isotonic aqueous buffer or pharmaceutically acceptable organic solvent. Where necessary, the compositions can also include a solubilizing agent. Compositions for intravenous administration can optionally include a local anesthetic such as lidocaine to lessen pain at the site of the injection. Generally, the ingredients are supplied either separately or mixed together in unit dosage form, for example, as a dry lyophilized powder or water free concentrate in a hermetically sealed container such as an ampoule or sachette indicating the quantity of active agent. Where oligonucleotide-containing pharmaceutical compositions are to be administered by infusion, they can be dispensed, for example, with an infusion bottle containing, for example, sterile pharmaceutical grade water or saline. Where the pharmaceutical compositions are administered by injection, an ampoule of sterile water for injection, saline, or other solvent such as a pharmaceutically acceptable organic solvent can be provided so that the ingredients can be mixed prior to administration.

[0575] In another embodiment, the pharmaceutical compositions are formulated in accordance with routine procedures as a composition adapted for oral administration. Compositions for oral delivery can be in the form of tablets, lozenges, aqueous or oily suspensions, granules, powders, emulsions, capsules, syrups, or elixirs, for example. Oral compositions can include standard excipients such as mannitol, lactose, starch, magnesium stearate, sodium saccharin, cellulose, and magnesium carbonate. Typically, the excipients are of pharmaceutical grade. Orally administered compositions can also contain one or more agents, for example, sweetening agents such as fructose, aspartame or saccharin; flavoring agents such as peppermint, oil of wintergreen, or cherry; coloring agents; and preserving agents, to provide a pharmaceutically palatable preparation. Moreover, when in tablet or pill form, the compositions can be coated to delay disintegration and absorption in the gastrointestinal tract thereby providing a sustained action over an extended period of time. Selectively permeable membranes surrounding an osmotically active driving compound are also suitable for orally administered compositions. A time-delay material such as glycerol monostearate or glycerol stearate can also be used.

[0576] The pharmaceutical compositions further comprising a solvent can optionally comprise a suitable amount of a pharmaceutically acceptable preservative, if desired, so as to provide additional protection against microbial growth. Examples of preservatives useful in the pharmaceutical compositions of the invention include, but are not limited to, potassium sorbate, methylparaben, propylparaben, benzoic acid and its salts, other esters of parahydroxybenzoic acid such as butylparaben, alcohols such as ethyl or benzyl alcohol, phenolic compounds such as phenol, or quaternary compounds such as benzalkonium chlorides (e.g., benzethonium chloride).

[0577] In one embodiment, the pharmaceutical compositions of the invention optionally contain a suitable amount of a pharmaceutically acceptable polymer. The polymer can increase the viscosity of the pharmaceutical composition. Suitable polymers for use in the compositions and methods of the invention include, but are not limited to, hydroxypropylcellulose, hydoxypropylmethylcellulose (HPMC), chitosan, polyacrylic acid, and polymethacrylic acid.

[0578] Typically, the polymer is present in an amount ranging from greater than 0 to 10 percent by weight of the pharmaceutical composition. In one embodiment, the polymer is present in an amount ranging from about 0.1 to 10 percent by weight of the pharmaceutical composition. In one embodiment, the polymer is present in an amount ranging from about 1 to 7.5 percent by weight of the pharmaceutical composition. In one embodiment, the polymer is present in an amount ranging from about 1.5 to 5 percent by weight of the pharmaceutical composition. In one embodiment, the polymer is present in an amount ranging from about 2 to 4 percent by weight of the pharmaceutical composition. In one embodiment, the pharmaceutical compositions of the invention are substantially free of polymers.

[0579] In one embodiment, any additional components added to the pharmaceutical compositions of the invention are designated as GRAS by the FDA for use or consumption by animals. In one embodiment, any additional components added to the pharmaceutical compositions of the invention are designated as GRAS by the FDA for use or consumption by humans.

[0580] The components of the pharmaceutical composition (the solvents and any other optional components) are preferably biocompatible and non-toxic and, over time, are simply absorbed and/or metabolized by the body.

[0581] As described above, the pharmaceutical compositions of the invention can further comprise a solvent.

[0582] In one embodiment, the solvent comprises water.

[0583] In one embodiment, the solvent comprises a pharmaceutically acceptable organic solvent.

[0584] In an embodiment, the oligonucleotide of the invention, e.g., a multipartite construct, an anti-C1Q oligonucleotide, a C10.36 oligonucleotide, as described above, or any combination thereof, are available as the salt of a metal cation, for example, as the potassium or sodium salt. These salts, however, may have low solubility in aqueous solvents and/or organic solvents, typically, less than about 25 mg/mL. The pharmaceutical compositions of the invention comprising (i) an amino acid ester or amino acid amide and (ii) a protonated oligonucleotide, however, may be significantly more soluble in aqueous solvents and/or organic solvents. Without wishing to be bound by theory, it is believed that the amino acid ester or amino acid amide and the protonated oligonucleotide form a salt, such as illustrated above, and the salt is soluble in aqueous and/or organic solvents.

[0585] Similarly, without wishing to be bound by theory, it is believed that the pharmaceutical compositions comprising (i) an oligonucleotide of the invention; (ii) a divalent metal cation; and (iii) optionally a carboxylate, a phospholipid, a phosphatidyl choline, or a sphingomyelin form a salt, such as illustrated above, and the salt is soluble in aqueous and/or organic solvents.

[0586] In one embodiment, the concentration of the oligonucleotide of the invention in the solvent is greater than about 2 percent by weight of the pharmaceutical composition. In one embodiment, the concentration of the oligonucleotide of the invention in the solvent is greater than about 5 percent by weight of the pharmaceutical composition. In one embodiment, the concentration of the oligonucleotide in the solvent is greater than about 7.5 percent by weight of the pharmaceutical composition. In one embodiment, the concentration of the oligonucleotide in the solvent is greater than about 10 percent by weight of the pharmaceutical composition. In one embodiment, the concentration of the oligonucleotide in the solvent is greater than about 12 percent by weight of the pharmaceutical composition. In one embodiment, the concentration of the oligonucleotide in the solvent is greater than about 15 percent by weight of the pharmaceutical composition. In one embodiment, the concentration of the oligonucleotide in the solvent is ranges from about 2 percent to 5 percent by weight of the pharmaceutical composition. In one embodiment, the concentration of the oligonucleotide in the solvent is ranges from about 2 percent to 7.5 percent by weight of the pharmaceutical composition. In one embodiment, the concentration of the oligonucleotide in the solvent ranges from about 2 percent to 10 percent by weight of the pharmaceutical composition. In one embodiment, the concentration of the oligonucleotide in the solvent is ranges from about 2 percent to 12 percent by weight of the pharmaceutical composition. In one embodiment, the concentration of the oligonucleotide in the solvent is ranges from about 2 percent to 15 percent by weight of the pharmaceutical composition. In one embodiment, the concentration of the oligonucleotide in the solvent is ranges from about 2 percent to 20 percent by weight of the pharmaceutical composition.

[0587] Any pharmaceutically acceptable organic solvent can be used in the pharmaceutical compositions of the invention. Representative, pharmaceutically acceptable organic solvents include, but are not limited to, pyrrolidone, N-methyl-2-pyrrolidone, polyethylene glycol, propylene glycol (i.e., 1,3-propylene glycol), glycerol formal, isosorbid dimethyl ether, ethanol, dimethyl sulfoxide, tetraglycol, tetrahydrofurfuryl alcohol, triacetin, propylene carbonate, dimethyl acetamide, dimethyl formamide, dimethyl sulfoxide, and combinations thereof.

[0588] In one embodiment, the pharmaceutically acceptable organic solvent is a water soluble solvent. A representative pharmaceutically acceptable water soluble organic solvents is triacetin.

[0589] In one embodiment, the pharmaceutically acceptable organic solvent is a water miscible solvent. Representative pharmaceutically acceptable water miscible organic solvents include, but are not limited to, glycerol formal, polyethylene glycol, and propylene glycol.

[0590] In one embodiment, the pharmaceutically acceptable organic solvent comprises pyrrolidone. In one embodiment, the pharmaceutically acceptable organic solvent is pyrrolidone substantially free of another organic solvent.

[0591] In one embodiment, the pharmaceutically acceptable organic solvent comprises N-methyl-2-pyrrolidone. In one embodiment, the pharmaceutically acceptable organic solvent is N-methyl-2-pyrrolidone substantially free of another organic solvent.

[0592] In one embodiment, the pharmaceutically acceptable organic solvent comprises polyethylene glycol. In one embodiment, the pharmaceutically acceptable organic solvent is polyethylene glycol substantially free of another organic solvent.

[0593] In one embodiment, the pharmaceutically acceptable organic solvent comprises propylene glycol.

[0594] In one embodiment, the pharmaceutically acceptable organic solvent is propylene glycol substantially free of another organic solvent.

[0595] In one embodiment, the pharmaceutically acceptable organic solvent comprises glycerol formal.

[0596] In one embodiment, the pharmaceutically acceptable organic solvent is glycerol formal substantially free of another organic solvent.

[0597] In one embodiment, the pharmaceutically acceptable organic solvent comprises isosorbid dimethyl ether. In one embodiment, the pharmaceutically acceptable organic solvent is isosorbid dimethyl ether substantially free of another organic solvent.

[0598] In one embodiment, the pharmaceutically acceptable organic solvent comprises ethanol. In one embodiment, the pharmaceutically acceptable organic solvent is ethanol substantially free of another organic solvent.

[0599] In one embodiment, the pharmaceutically acceptable organic solvent comprises dimethyl sulfoxide. In one embodiment, the pharmaceutically acceptable organic solvent is dimethyl sulfoxide substantially free of another organic solvent.

[0600] In one embodiment, the pharmaceutically acceptable organic solvent comprises tetraglycol. In one embodiment, the pharmaceutically acceptable organic solvent is tetraglycol substantially free of another organic solvent.

[0601] In one embodiment, the pharmaceutically acceptable organic solvent comprises tetrahydrofurfuryl alcohol. In one embodiment, the pharmaceutically acceptable organic solvent is tetrahydrofurfuryl alcohol substantially free of another organic solvent.

[0602] In one embodiment, the pharmaceutically acceptable organic solvent comprises triacetin. In one embodiment, the pharmaceutically acceptable organic solvent is triacetin substantially free of another organic solvent.

[0603] In one embodiment, the pharmaceutically acceptable organic solvent comprises propylene carbonate. In one embodiment, the pharmaceutically acceptable organic solvent is propylene carbonate substantially free of another organic solvent.

[0604] In one embodiment, the pharmaceutically acceptable organic solvent comprises dimethyl acetamide. In one embodiment, the pharmaceutically acceptable organic solvent is dimethyl acetamide substantially free of another organic solvent.

[0605] In one embodiment, the pharmaceutically acceptable organic solvent comprises dimethyl formamide. In one embodiment, the pharmaceutically acceptable organic solvent is dimethyl formamide substantially free of another organic solvent.

[0606] In one embodiment, the pharmaceutically acceptable organic solvent comprises at least two pharmaceutically acceptable organic solvents.

[0607] In one embodiment, the pharmaceutically acceptable organic solvent comprises N-methyl-2-pyrrolidone and glycerol formal. In one embodiment, the pharmaceutically acceptable organic solvent is N-methyl-2-pyrrolidone and glycerol formal. In one embodiment, the ratio of N-methyl-2-pyrrolidone to glycerol formal ranges from about 90:10 to 10:90.

[0608] In one embodiment, the pharmaceutically acceptable organic solvent comprises propylene glycol and glycerol formal. In one embodiment, the pharmaceutically acceptable organic solvent is propylene glycol and glycerol formal. In one embodiment, the ratio of propylene glycol to glycerol formal ranges from about 90:10 to 10:90.

[0609] In one embodiment, the pharmaceutically acceptable organic solvent is a solvent that is recognized as GRAS by the FDA for administration or consumption by animals. In one embodiment, the pharmaceutically acceptable organic solvent is a solvent that is recognized as GRAS by the FDA for administration or consumption by humans.

[0610] In one embodiment, the pharmaceutically acceptable organic solvent is substantially free of water. In one embodiment, the pharmaceutically acceptable organic solvent contains less than about 1 percent by weight of water. In one embodiment, the pharmaceutically acceptable organic solvent contains less about 0.5 percent by weight of water. In one embodiment, the pharmaceutically acceptable organic solvent contains less about 0.2 percent by weight of water. Pharmaceutically acceptable organic solvents that are substantially free of water are advantageous since they are not conducive to bacterial growth.

[0611] Accordingly, it is typically not necessary to include a preservative in pharmaceutical compositions that are substantially free of water. Another advantage of pharmaceutical compositions that use a pharmaceutically acceptable organic solvent, preferably substantially free of water, as the solvent is that hydrolysis of the oligonucleotide is minimized. Typically, the more water present in the solvent the more readily the oligonucleotide can be hydrolyzed. Accordingly, oligonucleotide containing pharmaceutical compositions that use a pharmaceutically acceptable organic solvent as the solvent can be more stable than oligonucleotide containing pharmaceutical compositions that use water as the solvent.

[0612] In one embodiment, comprising a pharmaceutically acceptable organic solvent, the pharmaceutical composition is injectable.

[0613] In one embodiment, the injectable pharmaceutical compositions are of sufficiently low viscosity that they can be easily drawn into a 20 gauge and needle and then easily expelled from the 20 gauge needle. Typically, the viscosity of the injectable pharmaceutical compositions are less than about 1,200 cps. In one embodiment, the viscosity of the injectable pharmaceutical compositions are less than about 1,000 cps. In one embodiment, the viscosity of the injectable pharmaceutical compositions are less than about 800 cps. In one embodiment, the viscosity of the injectable pharmaceutical compositions are less than about 500 cps. Injectable pharmaceutical compositions having a viscosity greater than about 1,200 cps and even greater than about 2,000 cps (for example gels) are also within the scope of the invention provided that the compositions can be expelled through an 18 to 24 gauge needle.

[0614] In one embodiment, comprising a pharmaceutically acceptable organic solvent, the pharmaceutical composition is injectable and does not form a precipitate when injected into water.

[0615] In one embodiment, comprising a pharmaceutically acceptable organic solvent, the pharmaceutical composition is injectable and forms a precipitate when injected into water. Without wishing to be bound by theory, it is believed, for pharmaceutical compositions that comprise a protonated oligonucleotide and an amino acid ester or amide, that the α-amino group of the amino acid ester or amino acid amide is protonated by the oligonucleotide to form a salt, such as illustrated above, which is soluble in the pharmaceutically acceptable organic solvent but insoluble in water. Similarly, when the pharmaceutical composition comprises (i) an oligonucleotide; (ii) a divalent metal cation; and (iii) optionally a carboxylate, a phospholipid, a phosphatidyl choline, or a sphingomyelin, it is believed that the components of the composition form a salt, such as illustrated above, which is soluble in the pharmaceutically acceptable organic solvent but insoluble in water. Accordingly, when the pharmaceutical compositions are injected into an animal, at least a portion of the pharmaceutical composition precipitates at the injection site to provide a drug depot. Without wishing to be bound by theory, it is believed that when the pharmaceutically compositions are injected into an animal, the pharmaceutically acceptable organic solvent diffuses away from the injection site and aqueous bodily fluids diffuse towards the injection site, resulting in an increase in concentration of water at the injection site, that causes at least a portion of the composition to precipitate and form a drug depot. The precipitate can take the form of a solid, a crystal, a gummy mass, or a gel. The precipitate, however, provides a depot of the oligonucleotide at the injection site that releases the oligonucleotide over time. The components of the pharmaceutical composition, i.e., the amino acid ester or amino acid amide, the pharmaceutically acceptable organic solvent, and any other components are biocompatible and non-toxic and, over time, are simply absorbed and/or metabolized by the body.

[0616] In one embodiment, comprising a pharmaceutically acceptable organic solvent, the pharmaceutical composition is injectable and forms liposomal or micellar structures when injected into water (typically about 500 μL are injected into about 4 mL of water). The formation of liposomal or micellar structures are most often formed when the pharmaceutical composition includes a phospholipid. Without wishing to be bound by theory, it is believed that the oligonucleotide in the form of a salt, which can be a salt formed with an amino acid ester or amide or can be a salt with a divalent metal cation and optionally a carboxylate, a phospholipid, a phosphatidyl choline, or a sphingomyelin, that is trapped within the liposomal or micellar structure. Without wishing to be bound by theory, it is believed that when these pharmaceutically compositions are injected into an animal, the liposomal or micellar structures release the oligonucleotide over time.

[0617] In one embodiment, the pharmaceutical composition further comprising a pharmaceutically acceptable organic solvent is a suspension of solid particles in the pharmaceutically acceptable organic solvent. Without wishing to be bound by theory, it is believed that the solid particles comprise a salt formed between the amino acid ester or amino acid amide and the protonated oligonucleotide wherein the acidic phosphate groups of the oligonucleotide protonates the amino group of the amino acid ester or amino acid amide, such as illustrated above, or comprises a salt formed between the oligonucleotide; divalent metal cation; and optional carboxylate, phospholipid, phosphatidyl choline, or sphingomyelin, as illustrated above. Pharmaceutical compositions that are suspensions can also form drug depots when injected into an animal.

[0618] By varying the lipophilicity and/or molecular weight of the amino acid ester or amino acid amide it is possible to vary the properties of pharmaceutical compositions that include these components and further comprise an organic solvent. The lipophilicity and/or molecular weight of the amino acid ester or amino acid amide can be varied by varying the amino acid and/or the alcohol (or amine) used to form the amino acid ester (or amino acid amide). For example, the lipophilicity and/or molecular weight of the amino acid ester can be varied by varying the R1 hydrocarbon group of the amino acid ester. Typically, increasing the molecular weight of R1 increase the lipophilicity of the amino acid ester. Similarly, the lipophilicity and/or molecular weight of the amino acid amide can be varied by varying the R3 or R4 groups of the amino acid amide.

[0619] For example, by varying the lipophilicity and/or molecular weight of the amino acid ester or amino acid amide it is possible to vary the solubility of the oligonucleotide of the invention in water, to vary the solubility of the oligonucleotide in the organic solvent, vary the viscosity of the pharmaceutical composition comprising a solvent, and vary the ease at which the pharmaceutical composition can be drawn into a 20 gauge needle and then expelled from the 20 gauge needle.

[0620] Furthermore, by varying the lipophilicity and/or molecular weight of the amino acid ester or amino acid amide (i.e., by varying R1 of the amino acid ester or R3 and R4 of the amino acid amide) it is possible to control whether the pharmaceutical composition that further comprises an organic solvent will form a precipitate when injected into water. Although different oligonucleotides exhibit different solubility and behavior, generally the higher the molecular weight of the amino acid ester or amino acid amide, the more likely it is that the salt of the protonated oligonucleotide and the amino acid ester of the amide will form a precipitate when injected into water. Typically, when R1 of the amino acid ester is a hydrocarbon of about C16 or higher the pharmaceutical composition will form a precipitate when injected into water and when R1 of the amino acid ester is a hydrocarbon of about C12 or less the pharmaceutical composition will not form a precipitate when injected into water. Indeed, with amino acid esters wherein R1 is a hydrocarbon of about C12 or less, the salt of the protonated oligonucleotide and the amino acid ester is, in many cases, soluble in water. Similarly, with amino acid amides, if the combined number of carbons in R3 and R4 is 16 or more the pharmaceutical composition will typically form a precipitate when injected into water and if the combined number of carbons in R3 and R4 is 12 or less the pharmaceutical composition will not form a precipitate when injected into water. Whether or not a pharmaceutical composition that further comprises a pharmaceutically acceptable organic solvent will form a precipitate when injected into water can readily be determined by injecting about 0.05 mL of the pharmaceutical composition into about 4 mL of water at about 98° F. and determining how much material is retained on a 0.22 μm filter after the composition is mixed with water and filtered. Typically, a formulation or composition is considered to be injectable when no more than 10% of the formulation is retained on the filter. In one embodiment, no more than 5% of the formulation is retained on the filter. In one embodiment, no more than 2% of the formulation is retained on the filter. In one embodiment, no more than 1% of the formulation is retained on the filter.

[0621] Similarly, in pharmaceutical compositions that comprise a protonated oligonucleotide and a diester or diamide of aspartic or glutamic acid, it is possible to vary the properties of pharmaceutical compositions by varying the amount and/or lipophilicity and/or molecular weight of the diester or diamide of aspartic or glutamic acid. Similarly, in pharmaceutical compositions that comprise an oligonucleotide; a divalent metal cation; and a carboxylate, a phospholipid, a phosphatidyl choline, or a sphingomyelin, it is possible to vary the properties of pharmaceutical compositions by varying the amount and/or lipophilicity and/or molecular weight of the carboxylate, phospholipid, phosphatidyl choline, or sphingomyelin.

[0622] Further, when the pharmaceutical compositions that further comprises an organic solvent form a depot when administered to an animal, it is also possible to vary the rate at which the oligonucleotide is released from the drug depot by varying the lipophilicity and/or molecular weight of the amino acid ester or amino acid amide. Generally, the more lipophilic the amino acid ester or amino acid amide, the more slowly the oligonucleotide is released from the depot. Similarly, when the pharmaceutical compositions that further comprises an organic solvent and also further comprise a carboxylate, phospholipid, phosphatidyl choline, sphingomyelin, or a diester or diamide of aspartic or glutamic acid and form a depot when administered to an animal, it is possible to vary the rate at which the oligonucleotide is released from the drug depot by varying the amount and/or lipophilicity and/or molecular weight of the carboxylate, phospholipid, phosphatidyl choline, sphingomyelin, or the diester or diamide of aspartic or glutamic acid.

[0623] Release rates from a precipitate can be measured injecting about 50 μL of the pharmaceutical composition into about 4 mL of deionized water in a centrifuge tube. The time that the pharmaceutical composition is injected into the water is recorded as T=0. After a specified amount of time, T, the sample is cooled to about −9° C. and spun on a centrifuge at about 13,000 rpm for about 20 min. The resulting supernatant is then analyzed by HPLC to determine the amount of oligonucleotide present in the aqueous solution. The amount of oligonucleotide in the pellet resulting from the centrifugation can also be determined by collecting the pellet, dissolving the pellet in about 10 μL of methanol, and analyzing the methanol solution by HPLC to determine the amount of oligonucleotide in the precipitate. The amount of oligonucleotide in the aqueous solution and the amount of oligonucleotide in the precipitate are determined by comparing the peak area for the HPLC peak corresponding to the oligonucleotide against a standard curve of oligonucleotide peak area against concentration of oligonucleotide. Suitable HPLC conditions can be readily determined by one of ordinary skill in the art.

[0624] Methods of Treatment

[0625] The pharmaceutical compositions of the invention are useful in human medicine and veterinary medicine. Accordingly, the invention further relates to a method of treating or preventing a condition in an animal comprising administering to the animal an effective amount of the pharmaceutical composition of the invention.

[0626] In one embodiment, the invention relates to methods of treating a condition in an animal comprising administering to an animal in need thereof an effective amount of a pharmaceutical composition of the invention.

[0627] In one embodiment, the invention relates to methods of preventing a condition in an animal comprising administering to an animal in need thereof an effective amount of a pharmaceutical composition of the invention.

[0628] Methods of administration include, but are not limited to, intradermal, intramuscular, intraperitoneal, intravenous, subcutaneous, intranasal, epidural, oral, sublingual, intracerebral, intravaginal, transdermal, rectal, by inhalation, or topical. The mode of administration is left to the discretion of the practitioner. In some embodiments, administration will result in the release of the oligonucleotide of the invention, e.g., a multipartite construct, an anti-C1Q oligonucleotide, a C10.36 oligonucleotide, as described above, or any combination thereof, into the bloodstream.

[0629] In one embodiment, the method of treating or preventing a condition in an animal comprises administering to the animal in need thereof an effective amount of an oligonucleotide by parenterally administering the pharmaceutical composition of the invention. In one embodiment, the pharmaceutical compositions are administered by infusion or bolus injection. In one embodiment, the pharmaceutical composition is administered subcutaneously.

[0630] In one embodiment, the method of treating or preventing a condition in an animal comprises administering to the animal in need thereof an effective amount of an oligonucleotide by orally administering the pharmaceutical composition of the invention. In one embodiment, the composition is in the form of a capsule or tablet.

[0631] The pharmaceutical compositions can also be administered by any other convenient route, for example, topically, by absorption through epithelial or mucocutaneous linings (e.g., oral, rectal, and intestinal mucosa, etc.).

[0632] The pharmaceutical compositions can be administered systemically or locally.

[0633] The pharmaceutical compositions can be administered together with another biologically active agent.

[0634] In one embodiment, the animal is a mammal.

[0635] In one embodiment the animal is a human.

[0636] In one embodiment, the animal is a non-human animal.

[0637] In one embodiment, the animal is a canine, a feline, an equine, a bovine, an ovine, or a porcine.

[0638] The effective amount administered to the animal depends on a variety of factors including, but not limited to the type of animal being treated, the condition being treated, the severity of the condition, and the specific multipartite construct being administered. A treating physician can determine an effective amount of the pharmaceutical composition to treat a condition in an animal.

[0639] In one embodiment, the multipartite construct comprises an anti-EpCAM aptamer segment. For example, the target of interest comprises EpCAM. In another embodiment, the target is selected from the group of proteins consisting of a EGFR, PBP, EpCAM, and KLK2. In another embodiment, the target is selected from the group of proteins consisting of a tetraspanin, EpCam, CD9, PCSA, CD63, CD81, PSMA, B7H3, PSCA, ICAM, STEAP, KLK2, SSX2, SSX4, PBP, SPDEF, and EGFR. In another embodiment, the target is selected from the group of proteins consisting of CD9, PSMA, PCSA, CD63, CD81, B7H3, IL 6, OPG-13, IL6R, PA2G4, EZH2, RUNX2, SERPINB3, and EpCam. In another embodiment, a target is selected from the group of proteins consisting of A33, a33 n15, AFP, ALA, ALIX, ALP, AnnexinV, APC, ASCA, ASPH (246-260), ASPH (666-680), ASPH (A-10), ASPH (D01P), ASPH (D03), ASPH (G-20), ASPH (H-300), AURKA, AURKB, B7H3, B7H4, BCA-225, BCNP1, BDNF, BRCA, CA125 (MUC16), CA-19-9, C-Bir, CD1.1, CD10, CD174 (Lewis y), CD24, CD44, CD46, CD59 (MEM-43), CD63, CD66e CEA, CD73, CD81, CD9, CDA, CDAC11a2, CEA, C-Erb2, C-erbB2, CRMP-2, CRP, CXCL12, CYFRA21-1, DLL4, DR3, EGFR, Epcam, EphA2, EphA2 (H-77), ER, ErbB4, EZH2, FASL, FRT, FRT c.f23, GDF15, GPCR, GPR30, Gro-alpha, HAP, HBD 1, HBD2, HER 3 (ErbB3), HSP, HSP70, hVEGFR2, iC3b, IL 6 Unc, IL-1B, IL6 Unc, IL6R, IL8, IL-8, INSIG-2, KLK2, L1CAM, LAMN, LDH, MACC-1, MAPK4, MART-1, MCP-1, M-CSF, MFG-E8, MIC1, MIF, MIS RII, MMG, MMP26, MMP7, MMP9, MS4A1, MUC1, MUC1 seq1, MUC1 seq11A, MUC17, MUC2, Ncam, NGAL, NPGP/NPFF2, OPG, OPN, p53, p53, PA2G4, PBP, PCSA, PDGFRB, PGP9.5, PIM1, PR (B), PRL, PSA, PSMA, PSME3, PTEN, R5-CD9 Tube 1, Reg IV, RUNX2, SCRN1, seprase, SERPINB3, SPARC, SPB, SPDEF, SRVN, STAT 3, STEAP1, TF (FL-295), TFF3, TGM2, TIMP-1, TIMP1, TIMP2, TMEM211, TMPRSS2, TNF-alpha, Trail-R2, Trail-R4, TrKB, TROP2, Tsg 101, TWEAK, UNC93A, VEGF A, and YPSMA-1. In another embodiment, the target is selected from the group of proteins consisting of 5T4, ACTG1, ADAM10, ADAM15, ALDOA, ANXA2, ANXA6, APOA1, ATP1A1, BASP1, C1orf58, C20orf114, C8B, CAPZA1, CAV1, CD151, CD2AP, CD59, CD9, CD9, CFL1, CFP, CHMP4B, CLTC, COTL1, CTNND1, CTSB, CTSZ, CYCS, DPP4, EEF1A1, EHD1, ENO1, F11R, F2, F5, FAM125A, FNBP1L, FOLH1, GAPDH, GLB1, GPX3, HIST1HIC, HIST1H2AB, HSP90AB1, HSPA1B, HSPA8, IGSF8, ITGB1, ITIH3, JUP, LDHA, LDHB, LUM, LYZ, MFGE8, MGAM, MMP9, MYH2, MYL6B, NME1, NME2, PABPC1, PABPC4, PACSIN2, PCBP2, PDCD6IP, PRDX2, PSA, PSMA, PSMA1, PSMA2, PSMA4, PSMA6, PSMA7, PSMB1, PSMB2, PSMB3, PSMB4, PSMB5, PSMB6, PSMB8, PTGFRN, RPS27A, SDCBP, SERINC5, SH3GL1, SLC3A2, SMPDL3B, SNX9, TACSTD1, TCN2, THBS1, TPI1, TSG101, TUBB, VDAC2, VPS37B, YWHAG, YWHAQ, and YWHAZ. In another embodiment, the target is selected from the group of proteins consisting of CD9, CD63, CD81, PSMA, PCSA, B7H3 and EpCam. CD9, CD63, CD81, PSMA, PCSA, B7H3 and EpCam. In another embodiment, the target is selected from the group of proteins consisting of a tetraspanin, CD9, CD63, CD81, CD63, CD9, CD81, CD82, CD37, CD53, Rab-5b, Annexin V, MFG-E8, Muc1, GPCR 110, TMEM211 and CD24 In another embodiment, the target is selected from the group of proteins consisting of A33, AFP, ALIX, ALX4, ANCA, APC, ASCA, AURKA, AURKB, B7H3, BANK1, BCNP1, BDNF, CA-19-9, CCSA-2, CCSA-3&4, CD10, CD24, CD44, CD63, CD66 CEA, CD66e CEA, CD81, CD9, CDA, C-Erb2, CRMP-2, CRP, CRTN, CXCL12, CYFRA21-1, DcR3, DLL4, DR3, EGFR, Epcam, EphA2, FASL, FRT, GAL3, GDF15, GPCR (GPR110), GPR30, GRO-1, HBD 1, HBD2, HNP1-3, IL-1B, IL8, IMP3, L1CAM, LAMN, MACC-1, MGC20553, MCP-1, M-CSF, MIC1, MIF, MMP7, MMP9, MS4A1, MUC1, MUC17, MUC2, Ncam, NGAL, NNMT, OPN, p53, PCSA, PDGFRB, PRL, PSMA, PSME3, Reg IV, SCRN1, Sept-9, SPARC, SPON2, SPR, SRVN, TFF3, TGM2, TIMP-1, TMEM211, TNF-alpha, TPA, TPS, Trail-R2, Trail-R4, TrKB, TROP2, Tsg 101, TWEAK, UNC93A, and VEGFA. In another embodiment, the target is selected from the group of proteins consisting of CD9, EGFR, NGAL, CD81, STEAP, CD24, A33, CD66E, EPHA2, Ferritin, GPR30, GPR110, MMP9, OPN, p53, TMEM211, TROP2, TGM2, TIMP, EGFR, DR3, UNC93A, MUC17, EpCAM, MUC1, MUC2, TSG101, CD63, B7H3, CD24, and a tetraspanin.

[0640] The immunosuppressive target can be a tumor-derived protein found on cMVs and/or cancer cells, including without limitation TGF-3, CD39, CD73, IL10, FasL or TRAIL.

[0641] In one embodiment, the multipartite construct can inhibit angiogenesis. In one embodiment, the multipartite construct can inhibit angiogenesis and the disease being treated is cancer. In one embodiment, the aptamer can inhibit angiogenesis and the disease being treated is a solid tumor. The multipartite construct can be a multipartite construct that inhibits a neoplastic growth or a cancer. In embodiments, the cancer comprises an acute lymphoblastic leukemia; acute myeloid leukemia; adrenocortical carcinoma; AIDS-related cancers; AIDS-related lymphoma; anal cancer; appendix cancer; astrocytomas; atypical teratoid/rhabdoid tumor; basal cell carcinoma; bladder cancer; brain stem glioma; brain tumor (including brain stem glioma, central nervous system atypical teratoid/rhabdoid tumor, central nervous system embryonal tumors, astrocytomas, craniopharyngioma, ependymoblastoma, ependymoma, medulloblastoma, medulloepithelioma, pineal parenchymal tumors of intermediate differentiation, supratentorial primitive neuroectodermal tumors and pineoblastoma); breast cancer; bronchial tumors; Burkitt lymphoma; cancer of unknown primary site; carcinoid tumor; carcinoma of unknown primary site; central nervous system atypical teratoid/rhabdoid tumor; central nervous system embryonal tumors; cervical cancer; childhood cancers; chordoma; chronic lymphocytic leukemia; chronic myelogenous leukemia; chronic myeloproliferative disorders; colon cancer; colorectal cancer; craniopharyngioma; cutaneous T-cell lymphoma; endocrine pancreas islet cell tumors; endometrial cancer; ependymoblastoma; ependymoma; esophageal cancer; esthesioneuroblastoma; Ewing sarcoma; extracranial germ cell tumor; extragonadal germ cell tumor; extrahepatic bile duct cancer; gallbladder cancer; gastric (stomach) cancer; gastrointestinal carcinoid tumor; gastrointestinal stromal cell tumor; gastrointestinal stromal tumor (GIST); gestational trophoblastic tumor; glioma; hairy cell leukemia; head and neck cancer; heart cancer; Hodgkin lymphoma; hypopharyngeal cancer; intraocular melanoma; islet cell tumors; Kaposi sarcoma; kidney cancer; Langerhans cell histiocytosis; laryngeal cancer; lip cancer; liver cancer; malignant fibrous histiocytoma bone cancer; medulloblastoma; medulloepithelioma; melanoma; Merkel cell carcinoma; Merkel cell skin carcinoma; mesothelioma; metastatic squamous neck cancer with occult primary; mouth cancer; multiple endocrine neoplasia syndromes; multiple myeloma; multiple myeloma/plasma cell neoplasm; mycosis fungoides; myelodysplastic syndromes; myeloproliferative neoplasms; nasal cavity cancer; nasopharyngeal cancer; neuroblastoma; Non-Hodgkin lymphoma; nonmelanoma skin cancer; non-small cell lung cancer; oral cancer; oral cavity cancer; oropharyngeal cancer; osteosarcoma; other brain and spinal cord tumors; ovarian cancer; ovarian epithelial cancer; ovarian germ cell tumor; ovarian low malignant potential tumor; pancreatic cancer; papillomatosis; paranasal sinus cancer; parathyroid cancer; pelvic cancer; penile cancer; pharyngeal cancer; pineal parenchymal tumors of intermediate differentiation; pineoblastoma; pituitary tumor; plasma cell neoplasm/multiple myeloma; pleuropulmonary blastoma; primary central nervous system (CNS) lymphoma; primary hepatocellular liver cancer; prostate cancer; rectal cancer; renal cancer; renal cell (kidney) cancer; renal cell cancer; respiratory tract cancer; retinoblastoma; rhabdomyosarcoma; salivary gland cancer; Sezary syndrome; small cell lung cancer; small intestine cancer; soft tissue sarcoma; squamous cell carcinoma; squamous neck cancer; stomach (gastric) cancer; supratentorial primitive neuroectodermal tumors; T-cell lymphoma; testicular cancer; throat cancer; thymic carcinoma; thymoma; thyroid cancer; transitional cell cancer; transitional cell cancer of the renal pelvis and ureter; trophoblastic tumor; ureter cancer; urethral cancer; uterine cancer; uterine sarcoma; vaginal cancer; vulvar cancer; Waldenstrom macroglobulinemia; or Wilm's tumor. The compositions and methods of the invention can be used to treat these and other cancers.

### Kits

[0642] The invention also provides a kit comprising one or more reagent to carry out the methods of the invention. For example, the one or more reagent can be the one or more aptamer, a buffer, blocker, enzyme, or combination thereof. The one or more reagent may comprise any useful reagents for carrying out the subject methods, including without limitation aptamer libraries, substrates such as microbeads or planar arrays or wells, reagents for biomarker and/or microvesicle isolation (e.g., via chromatography, filtration, ultrafiltration, centrifugation, ultracentrifugation, flow cytometry, affinity capture (e.g., to a planar surface, column or bead), polymer precipitation, and/or using microfluidics), aptamers directed to specific targets, aptamer pools that facilitate detection of a biomarker/microvesicle population, reagents such as primers for nucleic acid sequencing or amplification, arrays for nucleic acid hybridization, detectable labels, solvents or buffers and the like, various linkers, various assay components, blockers, and the like. The one or more reagent may also comprise various compositions provided by the invention. In an embodiment, the one or more reagent comprises one or more aptamer of the invention. The one or more reagent can comprise a substrate, such as a planar substrate, column or bead. The kit can contain instructions to carry out various assays using the one or more reagent.

[0643] In an embodiment, the kit comprises an oligonucleotide probe or composition provided herein. The kit can be configured to carry out the methods provided herein. For example, the kit can include an aptamer of the invention, a substrate, or both an aptamer of the invention and a substrate.

[0644] In an embodiment, the kit is configured to carry out an assay. For example, the kit can contain one or more reagent and instructions for detecting the presence or level of a biological entity in a biological sample. In such cases, the kit can include one or more binding agent to a biological entity of interest. The one or more binding agent can be bound to a substrate.

[0645] In an embodiment, the kit comprises a set of oligonucleotides that provide a particular oligonucleotide profile for a biological sample. An oligonucleotide profile can include, without limitation, a profile that can be used to characterize a particular disease or disorder. For example, the disease or disorder can be a proliferative disease or disorder, including without limitation a cancer. In some embodiments, the cancer comprises a breast cancer.

### EXAMPLES

### Example 1: Identification of DNA Oligonucleotides that Bind a Target

[0646] The target is affixed to a solid substrate, such as a glass slide or a magnetic bead. For a magnetic bead preparation, beads are incubated with a concentration of target protein ranging from 0.1 to 1 mg/ml. The target protein is conjugated to the beads according to a chemistry provided by the particular bead manufacturer. Typically, this involves coupling via an N-hydroxysuccinimide (NHS) functional group process. Unoccupied NHS groups are rendered inactive following conjugation with the target.

[0647] Randomly generated oligonucleotides (oligos) of a certain length, such as 32 base pairs long, are added to a container holding the stabilized target. Each oligo contains 6 thymine nucleotides (a “thymine tail”) at either the 5 or 3 prime end, along with a single molecule of biotin conjugated to the thymine tail. Additional molecules of biotin could be added. Each oligo is also manufactured with a short stretch of nucleotides on each end (5-10 base pairs long) corresponding to amplification primers for PCR (“primer tails”). The sequences are shown absent the thymine tails or primer tails.

[0648] The oligonucleotides are incubated with the target at a specified temperature and time in phosphate-buffered saline (PBS) at 37 degrees Celsius in 500 microliter reaction volume.

[0649] The target/oligo combination is washed 1-10 times with buffer to remove unbound oligo. The number of washes increases with each repetition of the process (as noted below).

[0650] The oligos bound to the target are eluted using a buffer containing a chaotropic agent such as 7 M urea or 1% SDS and collected using the biotin tag. The oligos are amplified using the polymerase chain reaction using primers specific to 5′ and 3′ sequences added to the randomized region of the oligos. The amplified oligos are added to the target again for another round of selection. This process is repeated as desired to observe binding enrichment.

### Example 2: Competitive Assay

[0651] The process is performed as in Example 1 above, except that a known ligand to the target, such as an antibody, is used to elute the bound oligo species (as opposed to or in addition to the chaotropic agent). In this case, anti-EpCAM antibody from Santa Cruz Biotechnology, Inc. was used to elute the aptamers from the target EpCAM.

### Example 3: Screening and Affinity Analysis

[0652] All aptamers generated from the binding assays described above are sequenced using a high-throughput sequencing platform, such as the Ion Torrent from Life Technologies:

[0653] Library Preparation—

[0654] Aptamers were pooled after ligating barcodes and adapter sequences (Life Technologies) according to manufacturer protocols. In brief, equimolar pools of the aptamers were made using the following steps: Analyzed an aliquot of each library with a Bioanalyzer™ instrument and Agilent DNA 1000 Kit or Agilent High Sensitivity Kit, as appropriate for the final library concentration.

[0655] The molar concentration (nmol/L) of each amplicon library was determined using the commercially available software (Agilent).

[0656] An equimolar pool of the library was prepared at the highest possible concentration.

[0657] The combined concentration of the pooled library stock was calculated.

[0658] The template dilution factor of the library pool was determined using the following equation: Template Dilution Factor=(Library pool concentration [pM])/26 pM).

[0659] Template Preparation—

[0660] Using a freshly diluted library, the aptamer pool resulting from binding assays provided above were sequenced using conventional sequencing protocols. High throughput (NextGen) sequencing methods can be used as desired.

[0661] Twenty aptamers were selected based on direct or competitive assays assessing binding to EpCAM (as described above).

[0662] Affinity Measurements—

[0663] These twenty aptamers were then tested for binding affinity using an in vitro binding platform. SPR can be used for this step, e.g., a Biacore SPR machine using the T200 control software, as follows:

[0664] Dilute the antigen to a concentration of 32 nM.

[0665] Prepare necessary dilutions for kinetics, starting at 32 nM prepare two-fold dilutions of antigen down to 0.5 nM.

[0666] The Biacore 200 control software is programmed with the following conditions: Solution: HBS-EP+ Buffer; Number of cycles: 3; Contact time: 120s; Flow rate: 30l/min; Dissociation time: 300s; Solution: Glycine-HCl pH 2.5; Contact time: 120s; Flow rate: 20 l/min; Stabilization period: 0s. The binding affinities of these aptamers are then measured using the SPR assay above, or an alternate in vitro assay assessing the aptamer for a desired function.

[0667] FIG. 5 shows the SPR data for aptamer BTX176881 (SEQ ID NO: 3). The figure comprises an association and dissociation graph of 1:1 fitting model of the biotinylated aptamers to EpCAM protein at the indicated concentrations (nM). Table 4 shows the calculated K_{d} values from the SPR measurements that are illustrated in FIG. 5. In addition, Table 4 shows the SPR data and calculated K_{d} values for BTX187269 (SEQ ID NO: 6) and Aptamer 4 (SEQ ID NO. 1).

TABLE 4
Calculated K_{D} values from SPR measurements

| Immobilized | | Conc | | K_{d} | | |
|---|---|---|---|---|---|---|
| aptamer | Analyte | (nM) | Response | (nM) | Full R² | Full Chi² |
| BTX176881 | EpCAM | 500 | 0.2434 | 8.40 | 0.989322 | 0.179008 |
| (SEQ ID No: | protein | 250 | 0.136 | 8.40 | 0.989322 | 0.179008 |
| 3) | | 100 | 0.0776 | 8.40 | 0.989322 | 0.179008 |
| BTX187269 | EpCAM | 500 | 0.2575 | 7.12 | 0.990323 | 0.215697 |
| (SEQ ID | protein | 250 | 0.1584 | 7.12 | 0.990323 | 0.215697 |
| NO: 6) | | 100 | 0.0551 | 7.12 | 0.990323 | 0.215697 |
| Aptamer 4 | EpCAM | 500 | 0.2742 | 10.10 | 0.986276 | 0.299279 |
| (SEQ ID | protein | 250 | 0.1618 | 10.10 | 0.986276 | 0.299279 |
| NO. 1) | | 100 | 0.0809 | 10.10 | 0.986276 | 0.299279 |

*K_{d}, R² and Chi² values by Global fitting for single reference method.

### Example 4: Motif Analysis

[0668] The process of Example 3 is followed to identity a high affinity aptamer to a target of interest. Once a high affinity aptamer is identified, its sequence is then analyzed using a software program to estimate its two-dimensional folding structure. Well-known sequence alignment programs and algorithms for motif identification can be used to identify sequence motifs and reduce the dimensionality of even large data sets of sequences. Further, software programs such as Vienna and mfold are well-known to those skilled in the art of aptamer selection and can be used to further group sequences based on secondary structure motifs (shared shapes). See FIG. 3A and FIG. 3B for example structure predictions. Shared secondary structure of course, does not guarantee identical three-dimensional structure. Therefore “wet-lab” validation of aptamers is still useful as no one set of in silico tools has yet been able to fully predict the optimal aptamer among a set of aptamer candidates.

### Example 5: Microvesicle-Based Aptamer Subtraction Assay

[0669] Circulating microvesicles are isolated from normal plasma (e.g., from individuals without cancer) using one of the following methods: 1) Isolation using the ExoQuick reagent according to manufacturer's protocol; 2) Ultracentrifugation comprising spin at 50,000 to 150,000 g for 1 to 20 hours then resuspending the pellet in PBS; 3) Isolation using the TEXIS reagent from Life Technologies according to manufacturer's protocol; and 4) filtration methodology. The filtration method is described in more detail as follows:

[0670] Place syringe and filter (1.2 μm Acrodisc Syringe Filter Versapor Membrane Non-Pyrogenic Ref: 4190, Pall Life Sciences) on open 7 ml 150K MWCO column (Pierce concentrators, 150K MWCO (molecular weight cut off) 7 ml. Part number: 89922). Fill open end of syringe with 5.2 ml of filtered 1×PBS prepared in sterile molecular grade water.

[0671] Pipette patient plasma (900-1000 μl) into the PBS in the syringe, pipette mix twice

[0672] Filter the plasma into the 7 ml 150K MWCO column.

[0673] Centrifuge 7 ml 150K MWCO columns at 2000×g at 20° C. (16° C. to 24° C.) for 1 hour.

[0674] After 1 hour spin, pour the flow-through into 10% bleach to be discarded.

[0675] Visually inspect sample volume. If plasma concentrate is above the 8.5 ml graduation on the concentrator tube, continue to spin plasma sample at 10 minute increments at 2000×g at 20° C. (16° C. to 24° C.) checking volume after each spin until plasma concentrate is between 8.0 and 8.5 mls.

[0676] Pipette mix slowly on the column a minimum of 6 times and adjust pipette to determine plasma concentrate volume. If volume is between 100 μl and Target Volume, transfer plasma concentrate to previously labeled co-polymer 1.5 ml tube. If volume is still greater than Target Volume, repeat the above centrifugation step.

[0677] Pour ˜45 mls of filtered 1×PBS prepared in sterile molecular grade water into 50 ml conical tube for use in the next step.

[0678] Add the appropriate amount of filtered 1×PBS to reconstitute the sample to the Target Volume.

[0679] The microvesicles produced using any of the isolation methods will comprise a mixture of vesicle types and will be various sizes with the possible exception of ultracentrifugation methods, which may favor isolating exosome size particles.

[0680] Randomly generated oligonucleotides (produced as described in Example 1 above) are incubated with the isolated normal vesicles in PBS overnight at room temperature or at 4 degrees Celsius.

[0681] The aptamers that do not bind to these vesicles are isolated by spinning down the vesicles at 50,000 to 150,000×g for 1 to 20 hours and collecting the supernatant.

[0682] The aptamer oligonucleotides are collected from the supernatant by running the mixture over a column containing streptavidin-coated beads. These aptamers are then added to vesicles isolated from diseased patients (using the same methods as above) and incubated overnight in PBS at room temperature or 4 degrees Celsius.

[0683] The vesicles are then spun at 50,000 to 150,000×g for 1 to 20 hours and the supernatant is discarded. The vesicles are resuspended in PBS and lysed using SDS or some similar detergent.

[0684] The aptamers are then captured by running the lysis mixture over a column of streptavidin-coated beads. The isolated aptamers are then subjected to a round of PCR to amplify the products.

[0685] The process is then repeated for a set number of times, e.g., 5 times. The remaining aptamer pool has been depleted of aptamers that recognize microvesicles found in “normal” plasma. Accordingly, this method can be used to enrich the pool in aptamers that recognize cancer vesicles. See FIG. 4.

### Example 6: Detection of Microvesicles Using Anti-EpCAM Aptamers

[0686] Aptamers can be used as binding agents to detect a biomarker. In this Example, aptamers are used as binding agents to detect EpCAM protein associated with microvesicles.

[0687] FIGS. 6A-D illustrate the use of an anti-EpCAM aptamer (Aptamer 4; SEQ ID NO. 1) to detect a microvesicle population in plasma samples. Plasma samples were obtained from three men with prostate cancer and three men without prostate cancer (referred to as controls or normals). Antibodies to the following microvesicle surface protein antigens of interest were conjugated to microbeads (Luminex Corp, Austin, Tex.): FIG. 6A) EGFR (epidermal growth factor receptor); FIG. 6B) PBP (prostatic binding protein; also known as PEBP1 (phosphatidylethanolamine binding protein 1)); FIG. 6C) EpCAM (epithelial cell adhesion molecule); and FIG. 6D) KLK2 (kallikrein-related peptidase 2). Microvesicles in the plasma samples were captured using the bead-conjugated antibodies. Fluorescently labeled Aptamer 4 was used as a detector in the microbead assay. FIGS. 6A-D show the average median fluorescence values (MFI values) detected for the bead-captured and Aptamer 4 detected microvesicles. Each plot individually shows the three cancer (C1-C3) and three normal samples (N1-N3). These data show that, on average, the prostate cancer samples have higher levels of microvesicles containing the target proteins than the normals.

### Example 7: Aptamer Target Identification

[0688] In this Example, aptamers conjugated to microspheres are used to assist in determining the target of two aptamers identified by library screening methods as described above. The general approach is shown in FIG. 7. The approach is used to verify the targets of CAR003, an aptamer identified by library screening to recognize EpCAM. See description above for CAR003. In this approach, the sequence of CAR003 is randomly rearranged before linkage to the microspheres. The microspheres are used as controls to bind to targets that are similar but not identical to the intended target molecule.

[0689] The protocol used is as follows:

[0690] 1) The candidate aptamers (here, CAR003) and negative control aptamers (here, randomly arranged CAR003) are synthesized with modifications to allow capture (here, the aptamers are biotinylated) and crosslinking (here, using the Sulfo-SBED Biotin Label Transfer Reagent and Kit, Catalog Number 33073 from Thermo Fisher Scientific Inc., Rockford, Ill., to allow photocrosslinking).

[0691] 2) Each of the aptamers is individually mixed with microvesicles having the target of interest (here, BrCa cell line microvesicles).

[0692] 3) After incubation to allow the aptamers to bind target, ultraviolet light is applied to the mixtures to trigger crosslinking of the aptamers with the microvesicle targets.

[0693] 4) The microvesicles are lysed, thereby releasing the crosslinked aptamer-target complex into solution.

[0694] 5) The crosslinked aptamer-target complexes are captured from solution using a streptavidin coated substrate.

[0695] 6) The crosslinked aptamer-target complexes for each aptamer are run individually on SDS-PAGE gel electrophoresis. The captured protein targets are visualized with Coomasie Blue staining.

[0696] 7) The crosslinking and binding steps may be promiscuous so that multiple bands including the intended target but also random proteins will appear on each of the gels. The intended target will be found in a band that appears on the gel with the candidate aptamer (here, CAR003) but not the related negative control aptamers (here, randomly arranged CAR003). The bands corresponding to the target are excised from the gel.

[0697] 8) Mass spectrometry (MS) is used to identify the aptamer target from the excised bands.

### Example 8: Disease Diagnosis

[0698] This example illustrates the use of oligonucleotide probes of the present invention to diagnose a proliferative disease.

[0699] A suitable quantity of an oligonucleotide or pool of oligonucleotides that bind a BrCa-derived population of microvesicles, such as identified herein, is synthesized via chemical means known in the art. The oligonucleotides are conjugated to a diagnostic agent suitable for detection, such as a fluorescent moiety, using a conjugation method known in the art.

[0700] The composition is applied to microvesicles isolated from blood samples taken from a test cohort of patients suffering from a proliferative disease associated with the overexpression of microvesicles, e.g. breast cancer. The composition is likewise applied to microvesicles isolated from blood samples taken from a negative control cohort, not suffering from a proliferative disease.

[0701] The use of appropriate detection techniques (e.g., microbead assay or flow cytometry) on the test cohort samples indicates the presence of disease, while the same techniques applied to the control cohort samples indicate the absence of disease.

[0702] The results show that the oligonucleotides of the present invention are useful in diagnosing proliferative diseases.

### Example 9: Theranostics

[0703] This example illustrates the use of oligonucleotide probes of the present invention to provide a theranosis for a drug for treating a proliferative disease.

[0704] A suitable quantity of an oligonucleotide or pool of oligonucleotides that bind a BrCa-derived population of microvesicles, such as identified herein, is synthesized via chemical means known in the art. The probes are conjugated to an agent suitable for detection, such as a fluorescent moiety, using a method known in the art such as conjugation. The oligonucleotide probe or panel of oligonucleotide probes are within a suitable composition, such as a buffered solution.

[0705] Treatment Selection.

[0706] The composition is applied to microvesicles isolated from blood samples taken from a test cohort of patients suffering from a proliferative disease, e.g. breast cancer, that responded to a certain treatment, e.g., trautuzamab. The composition is likewise applied to microvesicles isolated from blood samples taken from a control cohort consisting of patients suffering from the same proliferative disease that did not respond to the treatment. The use of appropriate detection techniques (e.g., microbead assay or flow cytometry) on the test cohort samples indicates that probes which bind the samples are useful for identifying patients that will respond to the treatment, while the same techniques applied to the control cohort samples identifies probes useful for identifying patients that will not respond to the treatment.

[0707] Treatment Monitoring.

[0708] In another setting, the composition is applied to microvesicles isolated from blood samples taken from a test cohort of patients suffering from a proliferative disease, e.g. breast cancer, prior to or during a course of treatment, such as surgery, radiotherapy and/or chemotherapy. The composition is then applied to microvesicles isolated from blood samples taken from the patients over a time course. The use of appropriate detection techniques (e.g., microbead assay or flow cytometry) on the test cohort samples indicates whether the detected population of disease-related microvesicles increases, decreases, or remains steady in concentration over time during the course of treatment. An increase in the population of disease-related microvesicles post-treatment may indicate that the treatment is ineffective whereas a decrease in the population of disease-related microvesicles post-treatment may indicate that the treatment has a beneficial effect.

[0709] The results show that the oligonucleotide probes of the present invention are useful in theranosing proliferative diseases.

### Example 10: Therapeutic Oligonucleotide Probes

[0710] This example illustrates the use of oligonucleotide probes of the present invention to treat a proliferative disease.

[0711] A suitable quantity of an oligonucleotide or pool of oligonucleotides that bind a BrCa-derived population of microvesicles, such as identified herein, is synthesized via chemical means known in the art. The oligonucleotides are conjugated to a chemotherapeutic agent, such as Doxil, using a conjugation method known in the art. The conjugate is formulated in an aqueous composition.

[0712] The composition is administered intravenously, in one or more doses, to a test cohort of mice suffering from a proliferative disease associated with the overexpression of the microvesicles, e.g. a breast cancer model. A control cohort, not suffering from a proliferative disease is administered the identical composition intravenously, according to a corresponding dosage regimen.

[0713] Pathological analysis of tumor samples and/or mouse survival indicates that mortality and/or morbidity are improved in the test cohort over the control cohort.

[0714] The results show that the oligonucleotides of the present invention are useful in treating proliferative diseases.

[0715] Useful oligonucleotides can be used to treat proliferative diseases in other organisms, e.g., a human.

### Example 11: Oligonucleotide—Sequencing Detection Method

[0716] This example illustrates the use of an oligonucleotide pool to detect microvesicles that are indicative of a phenotype of interest. The method makes use of a pool of oligonucleotides that have been enriched against a target of interest that is indicative of a phenotype of interest. The method in this Example allows efficient use of a library of oligonucleotides to preferentially recognize a target entity.

[0717] For purposes of illustration, the method is described in the Example with a microvesicle target from a bodily fluid sample. One of skill will appreciate that the method can be extended to other types of target entity (e.g., cells, proteins, various other biological complexes), sample (e.g., tissue, cell culture, biopsy, other bodily fluids) and other phenotypes (other cancers, other diseases, etc) by enriching an aptamer library against the desired input samples.

[0718] General workflow:

[0719] 1) Obtain sample (plasma, serum, urine or any other biological sample) of patients with unknown medical etymology and pre-treating them accordingly to ensure availability of the target of interest (see below). Where the target of interest is a microvesicle population, the microvesicles can be isolated and optionally tethered to a solid support such as a microbead.

[0720] 2) Expose pre-treated sample to an oligonucleotide pool carrying certain specificity against target of interest. As described herein, an oligonucleotide pool carrying certain specificity against the target of interest can be enriched using various selection schemes, e.g., using non-cancer microvesicles for negative selection and cancer microvesicles for positive selection as described above. DNA or RNA oligonucleotides can be used as desired.

[0721] 3) Contact oligonucleotide library with the sample.

[0722] 4) Elute any oligonucleotides bound to the target.

[0723] 5) Sequence the eluted oligonucleotides. Next generation sequencing methods can be used.

[0724] 6) Analyze oligonucleotide profile from the sequencing. A profile of oligonucleotides known to bind the target of interest indicates the presence of the target within the input sample. The profile can be used to characterize the sample, e.g., as cancer or non-cancer.

[0725] Protocol Variations:

[0726] Various configurations of the assay can be performed. Four exemplary protocols are presented for the purposes of the oligonucleotide-sequencing assay. Samples can be any appropriate biological sample. The protocols can be modified as desired. For example, the microvesicles can be isolated using alternate techniques instead or or in addition to ultracentrifugation. Such techniques can be disclosed herein, e.g., polymer precipitation (e.g., PEG), column chromatography, and/or affinity isolation.

[0727] Protocol 1:

[0728] Ultracentrifugation of 1-5 ml bodily fluid samples (e.g., plasma/serum/urine) (120K×g, no sucrose) with two washes of the precipitate to isolate microvesicles.

[0729] Measure total protein concentration of recovered sample containing the isolated microvesicles.

[0730] Conjugate the isolated microvesicles to magnetic beads (for example MagPlex beads (Luminex Corp. Austin Tex.)).

[0731] Incubate conjugated microvesicles with oligonucleotide pool of interest.

[0732] Wash unbound oligonucleotides by retaining beads using magnet.

[0733] Elute oligonucleotides bound to the microvesicles.

[0734] Amplify and purify the eluted oligonucleotides.

[0735] Oligonucleotide sequencing (for example, Next generation methods; Ion Torrent: fusion PCR, emulsion PCR, sequencing).

[0736] Assess oligonucleotide profile.

[0737] Protocol 2:

[0738] This alternate protocol does not include a microvesicle isolation step, microvesicles conjugation to the beads, or separate partitioning step. This may present non-specific binding of the oligonucleotides against the input sample.

[0739] Remove cells/debris from bodily fluid sample and dilute sample with PBS containing MgCl₂ (2 mM).

[0740] Pre-mix sample prepared above with oligonucleotide library.

[0741] Ultracentrifugation of oligonucleotide/sample mixture (120K×g, no sucrose). Wash precipitated microvesicles.

[0742] Recover precipitate and elute oligonucleotides bound to microvesicles.

[0743] Amplify and purify the eluted oligonucleotides.

[0744] Oligonucleotide sequencing (for example, Next generation methods; Ion Torrent: fusion PCR, emulsion PCR, sequencing).

[0745] Assess oligonucleotide profile.

[0746] Protocol 3:

[0747] This protocol uses filtration instead of ultracentrifugation and should require less time and sample volume.

[0748] Remove cells/debris from bodily fluid sample and dilute it with PBS containing MgCl₂ (2 mM).

[0749] Pre-mix sample prepared above with oligonucleotide library.

[0750] Load sample into filter (i.e., 150K or 300K MWCO filter or any other that can eliminate unbound or unwanted oligonucleotides). Centrifuge sample to concentrate. Concentrated sample should contain microvesicles.

[0751] Wash concentrate. Variant 1: Dilute concentrate with buffer specified above to the original volume and repeat centrifugation. Variant 2: Dilute concentrate with buffer specified above to the original volume and transfer concentrate to new filter unit and centrifuge. Repeat twice.

[0752] Recover concentrate and elute oligonucleotides bound to microvesicles.

[0753] Amplify and purify the eluted oligonucleotides.

[0754] Oligonucleotide sequencing (for example, Next generation methods; Ion Torrent: fusion PCR, emulsion PCR, sequencing).

[0755] Assess oligonucleotide profile.

[0756] Protocol 4:

[0757] Ultracentrifugation of 1-5 ml bodily fluid sample (120K×g, no sucrose) with 2 washes of the precipitate to isolate microvesicles.

[0758] Pre-mix microvesicles with oligonucleotide pool.

[0759] Load sample into 300K MWCO filter unite and centrifuge (2000×g). Concentration rate is ˜3×.

[0760] Wash concentrate. Variant 1: Dilute concentrate with buffer specified above to the original volume and centrifuge. Repeat twice. Variant 2: Dilute concentrate with buffer specified above to the original volume and transfer concentrate to new filter unit and centrifuge. Repeat twice

[0761] Recover concentrate and elute oligonucleotides bound to microvesicles.

[0762] Amplify and purify the eluted oligonucleotides.

[0763] Oligonucleotide sequencing (for example, Next generation methods; Ion Torrent: fusion PCR, emulsion PCR, sequencing).

[0764] Assess oligonucleotide profile.

[0765] In alterations of the above protocols, polymer precipitation is used to isolate microvesicles from the patient samples. For example, the oligonucleotides are added to the sample and then PEG4000 or PEG8000 at 4% or 8% concentration is used to precipitate and thereby isolate microvesicles. Elution, recovery and sequence analysis continues as above.

### Example 12: Plasma/Serum Probing with an Oligonucleotide Probe Library

[0766] The following protocol is used to probe a plasma or serum sample using an oligonucleotide probe library.

[0767] Input Oligonucleotide Library:

[0768] Use 2 ng input of oligonucleotide library per sample.

[0769] Input oligonucleotide library is a mixture of two libraries, cancer and non-cancer enriched, concentration is 16.3 ng/ul.

[0770] Dilute to 0.2 ng/ul working stock using Aptamer Buffer (3 mM MgCl₂ in 1×PBS)

[0771] Add 10 ul from working stock (equal to 2 ng library) to each optiseal tube

[0772] Materials:

[0773] PBS, Hyclone SH30256.01, LN: AYG165629, bottle#8237, exp. Jul. 2015

[0774] Round Bottom Centrifuge Tubes, Beckman 326820, LN:P91207

[0775] OptiSeal Centrifuge tubes and plugs, polyallomer Konical, Beckman 361621, lot# Z10804SCA

[0776] Ultracentrifuge rotor: 50.4 TI

[0777] Ultracentrifuge rotor: 50.4 TI, Beckman Caris ID#0478

[0778] Protocol:

[0779] 1 Pre-chill tabletop centrifuge, ultracentrifuge, buckets, and rotor at 4° C.

[0780] 2 Thaw plasma or serum samples

[0781] 3 Dilute 1 ml of samples with 1:2 with Aptamer Buffer (3 mM MgCl₂ in 1×PBS)

[0782] 4 Spin at 2000×g, 30 min, 4° C. to remove debris (tabletop centrifuge)

[0783] 5 Transfer supernatants for all samples to a round bottom conical

[0784] 6 Spin at 12,000×g, 45 min, 4° C. in ultracentrifuge to remove additional debris.

[0785] 7 Transfer supernatant about 1.8 ml for all samples into new OptiSeal bell top tubes (uniquely marked).

[0786] 8 Add 2 ng (in 10 ul) of DNA Probing library to each optiseal tube

[0787] 9 QS to 4.5 ml with Aptamer Buffer

[0788] 10 Fix caps onto the OptiSeal bell top tubes

[0789] 11 Apply Parafilm around caps to prevent leakage

[0790] 12 Incubate plasma and oligonucleotide probe library for 1 hour at room temperature with rotation

[0791] 13 Remove parafilm (but not caps)

[0792] 14 Place correct spacer on top of each plugged tube

[0793] 15 Mark pellet area on the tubes, insure this marking is facing outwards from center.

[0794] 16 Spin tubes at 120,000×g, 2 hr, 4° C. (inner row, 33,400 rpm) to pellet microvesicles.

[0795] 17 Check marking is still pointed away from center.

[0796] 18 Completely remove supernatant from pellet, by collecting liquid from opposite side of pellet marker and using a 10 ml syringe barrel and 21G2 needle

[0797] 19 Discard supernatant in appropriate biohazard waste container

[0798] 20 Add 1 ml of 3 mM MgCl2 diluted with 1×PBS

[0799] 21 Gentle vortex, 1600 rpm for 5 sec and incubate 5 min at RT.

[0800] 22 QS to ˜4.5 mL with 3 mM Mg C12 diluted with 1×PBS

[0801] 23 Fix caps onto the OptiSeal bell top tubes.

[0802] 24 Place correct spacer on top of each plugged tube.

[0803] 25 Mark pellet area on the tubes, insure this marking is facing outwards from center.

[0804] 26 Spin tubes at 120,000×g, 70 min, 4° C. (inner row 33,400 rpm) to pellet microvesicles

[0805] 27 Check marking in still pointed away from center.

[0806] 28 Completely remove supernatant from pellet, by collecting liquid from opposite side of pellet marker and using a 10 ml syringe barrel and 21G2 needle

[0807] 29 Discard supernatant in appropriate biohazard waste container

[0808] 30 Add 1 ml of 3 mM MgCl2 diluted with 1×PBS

[0809] 31 Gentle vortex, 1600 rpm for 5 sec and incubate 5 min at RT.

[0810] 32 QS to ˜4.5 mL with 3 mM Mg C12 diluted with 1×PBS

[0811] 33 Fix caps onto the OptiSeal bell top tubes.

[0812] 34 Place correct spacer on top of each plugged tube.

[0813] 35 Mark pellet area on the tubes, insure this marking is facing outwards from center.

[0814] 36 Spin tubes at 120,000×g, 70 min, 4° C. (inner row 33,400 rpm) to pellet microvesicles

[0815] 37 Check marking is still pointed away from center.

[0816] 38 Save an aliquot of the supernatant (100 ul into a 1.5 ml tube)

[0817] 39 Completely remove supernatant from pellet, by collecting liquid from opposite side of pellet marker and using a 10 ml syringe barrel and 21G2 needle

[0818] 40 Add 50 ul of Rnase-free water to the side of the pellet

[0819] 41 Leave for 15 min incubation on bench top

[0820] 42 Cut top off tubes using clean scissors.

[0821] 43 Resuspend pellet, pipette up and down on the pellet side

[0822] 44 Measure the volume, make a note on the volume in order to normalize all samples

[0823] 45 Transfer the measured resuspended eluted microvesicles with bound oligonucleotides to a Rnase free 1.5 ml Eppendorf tube

[0824] 46 Normalize all samples to 100 ul to keep it even across samples and between experiments.

[0825] Next Generation Sequencing Sample Preparation:

[0826] I) Use 50 ul of sample from above, resuspended in 100 ul H2O and containing microvesicle/oligo complexes, as template in Transposon PCR, 14 cycles.

[0827] II) AMPure transposon PCR product, use entire recovery for indexing PCR, 10 cycles.

[0828] III) Check indexing PCR product on gel, proceed with AMPure if band is visible. Add 3 cycles if band is invisible, check on gel. After purification quantify product with QuBit and proceed with denaturing and diluting for loading on HiSeq flow cell (Illumina Inc., San Diego, Calif.).

[0829] IV) 5 samples will be multiplexed per one flow cell. 10 samples per HiSeq.

### Example 13: Oligonucleotide Probe Library

[0830] This Example presents development of an oligonucleotide probe library to detect biological entities. In this Example, steps were taken to reduce the presence of double stranded oligonucleotides (dsDNA) when probing the patient samples. The data were also generated comparing the effects of 8% and 6% PEG used to precipitate microvesicles (and potentially other biological entities) from the patient samples.

[0831] Protocol:

[0832] 1) Pre-chill tabletop centrifuge at 4° C.

[0833] 2) Protease inhibition: dissolve 2 tablets of “cOmplete ULTRA MINI EDTA-free EASYpack” protease inhibitor in 1100 ul of H₂O (20× stock of protease inhibitor).

[0834] 3) Add 50 ul of protease inhibitor to the sample (on top of frozen plasma) and start thawing: 1 ml total ea.

[0835] 4) To remove cells/debris, spin samples at 10,000×g, 20 min, 4° C. Collect 1 ml supernatant (SN).

[0836] 5) Mix 1 ml supernatant from step 4 with 1 ml of 2×PBS 6 mM MgCl₃, collect 400 ul into 3 tubes (replicates A, B, C) and use it in step 6.

[0837] 6) Add competitor per Table 5: make dilutions in 1×PBS, 3 mM MgCl₂, mix well, pour into PGP25,T2 trough, pipet using multichannel.

TABLE 5
Competitors

| | | | | | Volume | | | |
|---|---|---|---|---|---|---|---|---|
| | | | | | from stock to | Buffer to | | |
| | | | Intermediate | Number | make | make | Final | |
| | Type of | Stock | stock | of | intermediate | intermediate | Volume, | Final |
| units | Competitor | Concentration | concentration | samples | stock, ul | stock | ul | Concentration |
| ng/ul | Salmon | — | 40 | — | — | — | 425.5 | 0.8 |
| | DNA | | | | | | | |
| ng/ul | tRNA | — | 40 | — | — | — | 425.5 | 0.8 |
| x | S1 | 20 | 0.5 | 280 | 65.5 | 2555.6 | 425.5 | 0.01 |

[0838] 7) Incubate for 10 min, RT, end-over-end rotation

[0839] The screened library comprised a 5′ region (5′ CTAGCATGACTGCAGTACGT 3′ (SEQ ID NO. 131)) followed by the random naïve aptamer sequences and a 3′ region (5′ CTGTCTCTTATACACATCTGACGCTGCCGACGA (SEQ ID NO. 132)). Pool of 6-3S and 8-3S oligonucleotide probing libraries is ready: 2.76 ng/ul (˜185 ng). Save pool stock and dilutions. New pool can be made by mixing 171.2 ul (500 ng) of library 6-3S (2.92 ng/ul) with 190.8 ul (500 ng) of library 8-3S (2.62 ng/ul). Aliquot pooled library into 30 ul and store at −80 C.

[0840] Add ssDNA oligonucleotide probing library to the final concentration 2.5 pg/ul for binding. Make dilutions in 1×PBS, 3 mM MgCl₂.

TABLE 6
Probe library calculations

| | | | | | | | Volume | |
|---|---|---|---|---|---|---|---|---|
| | | | ul from | | | | per | |
| | | | original | ul of | | | sample | |
| Original | | Required | stock to | buffer to | | | from | Final |
| stock, | | working | make | make | Final | Number of | working | concentration |
| ng/ul | Lib Name | stock (ng/ul) | working | working | volume, ul | samples | stock | (pg/ul) |
| 2.76 | Pooled | 0.1 | 26.1 | 694.1 | 720.2 | 60 | 10.9 | 2.5 |
| | library 6- | | | | | | | |
| | 3S/8-3S | | | | | | | |

[0841] 8) Binding: Incubate for 1 h at RT with rotation.

[0842] 9) Prepare polymer solution: 20% PEG8000 in 1×PBS 3 mM MgCl2 (dilute 40% PEG8000 with 2×PBS with 6 mM MgCl2). Add 20% PEG8000 to sample to the final concentration 6%. Invert few times to mix, incubate for 15 min at 4 C

TABLE 7
PEG calculations

| | | | | | Volume of | Sample | | |
|---|---|---|---|---|---|---|---|---|
| | | | | Volume | buffer to | volume | | Total 20% |
| PEG | | | Final | 20% PEG | adjust final | before | Total | PEG |
| MW | PEG stock, % | Final conc., % | volume, ul | to add, ul | volume, ul | adding PEG | samples | needed, ml |
| 8000 | 20 | 6 | 622.8 | 186.9 | −0.4 | 436.4 | 60 | 11.2 |

[0843] 10) Spin at 10,000×g for 5 min, RT.

[0844] 11) Remove SN, add 1 ml 1×PBS, 3 mM MgCl2 and wash pellet by gentle inversion with 1 ml aptamer buffer.

[0845] 12) Remove buffer, Re-suspend pellets in 100 ul H2O: incubate at RT for 10 min on mixmate 900 rpm to re-suspend.

[0846] 13) Make sure each sample is re-suspended by pipeting after step 13. Make notes on hardly re-suspendable samples.

[0847] 14) 50 ul of re-suspended sample to indexing PCR->next generation sequencing (NGS).

[0848] 15) Keep leftover at 4 C

[0849] Technical Validation:

[0850] The current protocol was tested versus a protocol using 8% PEG8000 to precipitate microvesicles. The current protocol further comprises steps to reduce dsDNA in the oligonucleotide probing libraries.

[0851] FIG. 8A shows the within sample variance (black) between binding replicates and the between sample variance (grey). Black is on top of grey, thus any observable grey oligo is informative about differences in the biology of two patient samples. This evaluation of Sources of Variance shows that the technical variances is significantly smaller than the biological variance.

[0852] FIG. 8B shows the impact of using a higher proportion of single stranded DNA and PEG 6% isolation (white bars) compared to when there is a higher amount of double stranded DNA and 8% PEG (grey). This data indicates that the protocol in this Example improves biological separation between patients.

[0853] The plots in FIG. 8C show the difference between an earlier protocol (PEG 8% with increased dsDNA) and a modified protocol of the Example (PEG 6% no dsDNA). The black is the scatter between replicates (independent binding events) and the grey is the difference between patients. This data shows that the signal to noise increased significantly using the newer protocol.

[0854] Patient Testing:

[0855] The protocol above was used to test patient samples having the following characteristics:

TABLE 8
Patient characteristics

| Sample Type | Description |
|---|---|
| Cancer | Mixed type carcinoma; Malignant; |
| Cancer | Invasive, predominant intraductal component (8500/3) |
| Cancer | Fibrocystic Changes; Invasive lobular carcinoma - 8520/3; Lobular carcinoma in |
| | situ - 8520/2; Benign; In situ and grade 3 intraepith; Malignant; Fat necrosis, |
| | periductal inflammation, malignant cellsFat necrosis; Inflammation; Benign; |
| Cancer | Invasive, predominant intraductal component (8500/3) |
| Cancer | Mucinous (colloid) adenocarcinoma (8480/3) |
| Cancer | Invasive lobular carcinoma - 8520/3; Microcalcifications; Benign; Malignant; |
| Cancer | Otherfibrocystic changeInvasive, NOS (8500/3) |
| Cancer | Invasive ductal carcinoma, not otherwise specified (NOS) - 8500/3; Malignant; |
| Cancer | Invasive ductal carcinoma, not otherwise specified (NOS) - 8500/3; Malignant; |
| Cancer | Intraductal carcinoma, non-infiltrating, NOS (in situ) (8500/2) |
| Cancer | Atypical lobular hyperplasia |
| | Otherfibrocystic changes, inter and intralobular fibrosis, apocrine metaplasia, |
| | columnar cell change, microcalcificationsInvasive, NOS (8500/3) |
| Cancer | FibroadenomaInvasive, NOS (8500/3) |
| Cancer | Ductal carcinoma in situ - 8500/2; Invasive ductal carcinoma, not otherwise |
| | specified (NOS) - 8500/3; Microcalcifications; Benign; In situ and grade 3 |
| | intraepith; Malignant; |
| Cancer | Ductal carcinoma in situ - 8500/2; Invasive lobular carcinoma - 8520/3; Lobular |
| | carcinoma in situ - 8520/2; In situ and grade 3 intraepith; Malignant; |
| Cancer | Ductal carcinoma in situ - 8500/2; Invasive ductal carcinoma, not otherwise |
| | specified (NOS) - 8500/3; Microcalcifications; Benign; In situ and grade 3 |
| | intraepith; Malignant; Focal Micropapillary Features, invasive ductal carcinoma |
| | with micropapillary features, invasive ductal carcinoma with mucinous and |
| | micropapillary featInvasive ductal carcinoma with micropapillary and mucinous |
| | features; Invasive micropapillary carcinoma - 8507/3; Malignant; |
| Cancer | Invasive, predominant intraductal component (8500/3) |
| Cancer | Invasive ductal carcinoma, not otherwise specified (NOS) - 8500/3; Malignant; |
| Cancer | Invasive, NOS (8500/3) |
| Cancer | Infiltrating duct and lobular carcinoma (8522/3) |
| Cancer | Invasive, predominant in situ component (8520/3) |
| Non-Cancer | Otherusual ductal hyperplasia, apocrine metaplasia, microcysts, elastosis |
| Non-Cancer | Otherstromal fibrosis, fibrous cyst wall |
| Non-Cancer | Otherfibrocystic change, stromal fibrosis, cyst formation, microcalcifications, |
| | apocrine metaplasia, sclerosing adenosis, usual ductal hyperplasia |
| Non-Cancer | Otherfibrocystic changes, apocrine metaplasia, cystic change, usual ductal |
| | hyperplasia |
| Non-Cancer | Otherfibrocystic change, microcalcifications |
| Non-Cancer | Fibroadenoma |
| Non-Cancer | Otherintraductal papilloma, sclerosis, microcalcifications, stromal fibrosis |
| Non-Cancer | Fibroadenoma |
| Non-Cancer | Otherfat necrosis |
| Non-Cancer | Otherstromal fibrosis, microcalcifications |
| Non-Cancer | Otherfibrocystic change, microcystic change, focal secretory features |
| Non-Cancer | Otherstromal fibrosis |
| Non-Cancer | Fibroadenoma Otheradenosis, columnar cell change/hyperplasia, usual ductal |
| | hyperplasia |
| Non-Cancer | OtherFNA - insufficient material for diagnosis |
| Non-Cancer | Otherintraductal papilloma |
| Non-Cancer | Otherfibrocystic changes, duct ectasia, usual ductal hyperplasia, apocrine |
| | metaplasia, microcalcifications |

[0856] Microvesicles (and potentially other biological entities) were precipitated in blood (plasma) samples from the above patients using polymer precipitation with PEG as indicated above. The protocol was used to probe the samples with the oligonucleotide probe libraries. Sequences that bound the PEG precipitated samples were identified using next generation sequencing (NGS).

[0857] FIG. 8D shows scatter plots of a selection of results from testing the 40 patients listed previously. The spread in the data indicates that large numbers of oligos were detected that differed between samples. The number of significant oligos found is much greater than would be expected randomly as shown in Table 9. The table shows the number of oligonucleotides sorted by copy number detected and p-value. The d-# indicates the number copies of a sequence observed for the data in the rows.

TABLE 9
Expected versus observed sequences

| | Total Number | P-0.1 | P-0.05 | P-0.01 | P-0.005 |
|---|---|---|---|---|---|
| d-50 | 83,632 | 47,020 | 30,843 | 5,934 | 2,471 |
| d-100 | 52,647 | 29,106 | 19,446 | 3,893 | 1,615 |
| d-200 | 23,753 | 14,681 | 9,880 | 2,189 | 914 |
| d-500 | 10,155 | 4,342 | 2,927 | 725 | 315 |
| d-50 | 100.0% | 56.2% | 36.9% | 7.1% | 3.0% |
| d-100 | 100.0% | 55.3% | 36.9% | 7.4% | 3.1% |
| d-200 | 100.0% | 51.1% | 34.4% | 7.6% | 3.2% |
| d-500 | 100.0% | 42.8% | 28.8% | 7.1% | 3.1% |

| | | | | |
|---|---|---|---|---|
| Maximum expected | 10.0% | 5.0% | 1.0% | 0.5% |

[0858] As a control, the cancer and non-cancer samples were randomly divided into two groups. Such randomization of the samples significantly reduced the number of oligos found that differentiate between sample groups. Indeed, there was a 50-fold increase in informative oligos between the cancer/non-cancer grouping versus random grouping. FIG. 8E shows data as in Table 9 and indicates the number of observed informative oligos between the indicated sample groups.

[0859] FIG. 8F shows distinct groups of oligos that differentiate between cancer and non-cancer samples. The figure shows a heatmap of the 40 samples tested with oligos selected that had more than 500 copies and p-value less than 0.005. There are clear subpopulations emerging with a distinct non-cancer cohort at the top. The non-cancer samples have boxes around them on the left axis. FIG. 8G is similar and shows results with an additional 20 cancer and 20 non-cancer samples. As shown, analysis with the 80 samples provides the emergence of more distinct and larger clusters.

[0860] The data for the additional 80 samples was also used to compare the consistency of informative oligos identified in different screening experiments. Of the 315 informative oligos identified using the first set of 40 patients, 86% of them showed fold-change in a consistent manner when tested on the independent set of 40 patients.

### Example 14: Enrichment of Oligonucleotide Probes Using a Balanced Library Design

[0861] In this Example, a naïve ADAPT oligonucleotide library was screened to enrich oligonucleotides that identify microvesicles circulating in the blood of breast cancer patients and microvesicles circulating in the blood of healthy, control individuals (i.e., without breast cancer). The input library was the naïve F-TRin-35n-B 8-3s library, which comprises a 5′ region (5′ CTAGCATGACTGCAGTACGT (SEQ ID NO. 131)) followed by the random naïve aptamer sequences of 35 nucleotides and a 3′ region (5′ CTGTCTCTTATACACATCTGACGCTGCCGACGA (SEQ ID NO. 132)). The “balanced” design is described in Example 23 of Int'l Patent Publication WO/2015/031694 (Appl. No. PCT/US2014/053306, filed Aug. 28, 2014). The working library comprised approximately 2×10¹³ synthetic oligonucleotide sequences. The naïve library may be referred to as the “L0 Library” herein.

[0862] The L0 Library was enriched against fractionated plasma samples from breast cancer patients and from healthy (non-breast cancer) controls using the protocol shown in FIG. 14A. In Step 1, an aliquot of approximately 10¹¹ sequences of PCR-amplified L0 was incubated with pooled blood-plasma from 59 breast cancer patients with positive biopsy (represented by “Source A” in FIG. 14A). In parallel, another aliquot of 10¹¹ sequences was incubated with pooled blood-plasma from 30 patients with suspected breast cancer who proved negative on biopsy and 30 self declared healthy women (represented by “Source B” in FIG. 14A). In Step 2, microvesicles (extracellular vesicles, “EV”) were precipitated using ultracentrifugation (UC) from both L0-samples. The EV-associated oligodeoxynucleotides (ODNs) were recovered from the respective pellets. In Step 3, a counter-selection step (Step 3) was carried out by incubation of each enriched library with plasma from the different cohorts to drive the selection pressure towards enrichment of ODNs specifically associated with each sample cohort. In this step, sequences contained in the EV pellets were discarded. In Step 4, a second positive selection was performed. In this step, the sequences contained in the respective supernatants (sn) from Step 3 were mixed with plasma from another aliquot of each positive control sample-population, and EVs were again isolated. EV-associated ODNs were recovered, representing two single-round libraries called library L1 for positive enrichment of cancer (positive biopsy) patients, and library L2 for the positive enrichment against control patients. In a final step, L1 and L2 were amplified by PCR, reverted to single stranded DNA (ssDNA), and mixed to yield library L3.

[0863] This enrichment scheme was iterated two times more using L3 as the input to further reduce the complexity of the profiling library to approximately 10⁶ different sequences. In Step 2, UC was used for partitioning of microvesicles, which may increase the specificity for the EV fraction. In Steps 3 and 4, partitioning was performed using PEG-precipitation. This procedure enriches for ODNs specific for each biological source. Library L3 contains those ODNs that are associated with targets characteristic for EV-populations from both sources, i.e. ODNs acting as aptamers that bind to molecules preferentially expressed in each source. A total of biopsy-positive (n=59), biopsy-negative (n=30), and self-declared normal (n=30) were used in the first round of L3 enrichment, while only the cancer and non-cancer samples were used in the subsequent rounds.

[0864] The enriched libraries were characterized using next-generation-sequencing (NGS) to measure copy numbers of sequences contained in each profiling library. NGS of L0 shows that the vast majority of sequences existed in low copy numbers, whereas libraries L1 and L2 showed significantly higher average counts per sequence (FIG. 14B) and a reduced amount of different sequences, with unaltered total valid reads, (FIG. 14C) consistent with an enrichment process.

### Example 15: Analysis of ADAPT-Identified Biomarkers

[0865] As described herein, e.g., in the section entitled “Aptamer Target Identification,” an unknown target recognized by an aptamer can be identified. In this Example, an oligonucleotide probe library (also referred to as Adaptive Dynamic Artificial Poly-ligand Targeting (ADAPT) libraries or Topographical Oligonucleotide Probe “TOP” libraries) was developed as described here and targets of the screened oligonucleotides were determined. This Example used a ADAPT library generated by enriching microvesicles collected from the blood of breast cancer patients and normal controls (i.e., non-cancer individuals). The enrichment protocols are described herein in Example 14.

[0866] Materials & Methods

[0867] SBED Library Conjugation

[0868] A naïve F-TRin-35n-B 8-3s library was enriched against microvesicles from normal female plasma. The naïve unenriched library comprised a 5′ region (5′ CTAGCATGACTGCAGTACGT (SEQ ID NO. 131)) followed by the random naïve aptamer sequences of 35 nucleotides and a 3′ region (5′ CTGTCTCTTATACACATCTGACGCTGCCGACGA (SEQ ID NO. 132)). The naïve library may be referred to as the “L0 Library” herein and the enriched library referred to as the “L2 library.” See Example 14. The screened library was PCR amplified with a C6-amine sense primer (C6 Amine-5′ CTAGCATGACTGCAGTACGT 3′ (SEQ ID NO. 131)) and a 5′ phosphorylated anti-sense primer (5′ Phos TCGTCGGCAGCGTCA (SEQ ID NO. 133)), the purified product was strand separated and conjugated with sulfo-SBED (Thermo Scientific) according to Vinkenborg et al. (Angew Chem Int Ed Engl. 2012, 51:9176-80) with the following modifications: The reaction was scaled down to 5 μg C6-amine DNA library (8.6 μM) in 25 mM HEPES-KOH, 0.1M NaCl, pH 8.3 and incubated with either 100-fold molar excess of sulfo-SBED or DMSO in a 21 μL volume for 30 min at room temp in the dark. The SBED-conjugated library was immediately separated from the unconjugated library and free sulfo-SBED by injection onto a Waters X-Bridge™ OST C-18 column (4.6 mm×50 mm) and fractionated by HPLC (Agilent 1260 Infinity) with a linear gradient Buffer A: 100 mM TEAA, pH7.0, 0% ACN to 100 mM TEAA, pH7.0, 25% ACN at 0.2 ml/min, 65° C. There SBED-conjugated fractions were desalted into water with Glen Gel-Pak™ Cartridges and concentrated by speed-vac. SBED conjugation was confirmed by LC-MS and/or a dot blot with streptavidin-HRP detection.

[0869] Binding Reaction and Cross-Linking

[0870] SBED library functionalization was tested by performing the ADAPT assay with SBED vs DMSO mock conjugated control C6-amine library and sequenced on a HiSeq 2500TM (Illumina Corp.). The aptamer precipitation was performed with forty-eight ADAPT reactions incubated for 1 hr with end-over-end rotation at room temp with a 5 ng input of SBED conjugated library per 200 μL of plasma (pre-spun to remove cellular debris at 10,000×g for 20 min, 4° C.) in 1×PBS, 3 mM MgCl₂, 0.01 mM dextran sulfate, 40 ng/μl salmon sperm DNA and 40 ng/μl yeast transfer RNA, and cOmplete ULTRA Mini EDTA-Free™ protease inhibitors (Roche) equivalent to ˜240 ng library and 9.6 mls plasma. A duplicate set of 48 reactions was prepared with the DMSO control C6-amine library. Aptamer library-protein complexes were precipitated with incubation in 6% PEG8000 for 15 min at 4° C. then centrifuged at 10,000×g for 5 min. Pellets were washed with 1 ml 1×PBS, 3 mM MgCl2 by gentle inversion to remove unbound aptamers. The washed pellets were resuspended in 100 μL of water and subjected to photo-cross-linking at 365 nm with a hand-held 3UV (254NM/302NM/365NM) lamp, 115 volts (Thermo Scientific) for 10 min on ice with 1-2 cm between the 96-well plate and lamp.

[0871] Oligonucleotide Precipitation

[0872] Cross-linked reactions were subsequently pooled (˜4.8 ml) per library or 4.8 ml of 1×PBS (AP bead only control) and incubated with 10 μL of Prepared Dynabeads® MyOne™ Streptavidin C1 (10 mg/ml) (Life Technologies) (pre-washed with 1×PBS, 0.01% Triton X-100) shaking for 1 hr at room temp. Beads were transferred to an eppendorf tube and lysed for 20 min with lysis buffer (50 mM Tris-HCl, 10 mM MgCl2, 200 mM NaCl, 0.5% Triton X-100, 5% glycerol, pH 7.5) on ice, washed 3 times with wash buffer 1 (10 mM Tris-HCl, 1 mM EDTA, 2M NaCl, 1% Triton X-100), followed by 2 times with wash buffer 2 (10 mM Tris-HCl, 1 mM EDTA, 2M NaCl, 0.01% Triton X-100) as described by Vinkenborg et al. (Angew Chem Int Ed Engl. 2012, 51:9176-80). Cross-linked proteins were eluted by boiling 15 min in 1×LDS sample buffer with reducing agent added (Life Technologies) and loaded on a 4-12% SDS-PAGE gradient gel (Life Technology). Proteins and DNA were detected with double staining with Imperial Blue Protein Stain (Thermo Scientific) followed by Prot-SIL2 ™ silver stain kit (Sigma) used according to manufacturer's instructions in order to enhance sensitivity and reduce background.

[0873] Protein Identification

[0874] Protein bands that appeared to differ between the cancer and normal were excised from the gradient gels and subjected to liquid chromatography-tandem mass spectrometry (LC-MS/MS).

[0875] Results

[0876] ADAPT protein targets were identified from bands cut from a silver stained SDS-PAGE gel (FIG. 9). Aptamer-SBED protein complexes (lane 3) or Aptamer-DMSO protein complexes (control-lane 4) were precipitated with 6% PEG8000, subjected to UV photo-cross-linking, and pulled-down with Streptavidin coated beads. Eluate was analyzed under reducing conditions by SDS-PAGE and silver staining. Aptamer library alone (5 ng) (lane 1) was loaded as a control for migration of the library (second to bottom arrows) and an equal volume of eluate from a bead only sample (lane 4) was loaded as a streptavidin control to control for potential leaching of the streptavidin monomer (bottom arrow) under the harsh elution conditions. Upper arrows (“Targets”) indicate specific or more predominant bands identified with the SBED-conjugated library vs. the mock DMSO treated control C6-amine library. Indicated target protein bands were cut out and sent for LC-MS/MS protein identification or indicated DNA library bands were eluted, reamplified and sequenced. The identified proteins are those that appeared as upregulated in the normal samples.

[0877] Tables 10-17 list human proteins that were identified in 8 bands excised from the silver stained gel. In all tables the proteins are those identified in the oligo-SBED protein complexes with proteins identified in the corresponding control lanes removed. The band numbers in the tables indicate different bands cut from the gel (FIG. 9). Accession numbers in the table are from the UniProt database (www.uniprot.org). “GN=” is followed by the gene name. Various protein classifications indicated in the Tables 10-17 include Nucleic Acid Binding Proteins (NAB), Tumor suppressors (TS), cell adhesion/cytoskeletal (CA/CK) and abundant plasma proteins (ABP). In Table 18, the proteins listed below the row “SBED associated” were identified by peptide fragments linked to SBED, indicating that the peptides are from near the cross-linking sites. Class is not reported for these proteins.

TABLE 10
Band 3

| Accession | | |
|---|---|---|
| number | Class | Protein name |
| P02538 | CA/CK | Keratin, type II cytoskeletal 6A GN = KRT6A |
| P15924 | CA/CK | Desmoplakin GN = DSP |
| P04259 | CA/CK | Keratin, type II cytoskeletal 6B GN = KRT6B |
| P60709 | CA/CK | Actin, cytoplasmic 1 GN = ACTB |
| P20930 | CA/CK | Filaggrin GN = FLG |
| P07476 | CA/CK | Involucrin GN = IVL |
| P31947 | TS | 14-3-3 protein sigma GN = SFN |
| Q7Z794 | CA/CK | Keratin, type II cytoskeletal 1b GN = KRT77 |
| P02545 | NAB | Prelamin-A/C GN = LMNA |
| P19012 | CA/CK | Keratin, type I cytoskeletal 15 GN = KRT15 |
| P47929 | CA/CK & TS | Galectin-7 GN = LGALS7 |
| P11142 | | Heat shock cognate 71 kDa protein GN = HSPA8 |
| P58107 | NAB | Epiplakin GN = EPPK1 |
| P08107 | | Heat shock 70 kDa protein 1A/1B GN = HSPA1A |
| Q02413 | CA/CK | Desmoglein-1 GN = DSG1 |
| P06396 | CA/CK | Gelsolin GN = GSN |
| O60814 | NAB | Histone H2B type 1-K GN = HIST1H2BK |
| P68104 | NAB | Elongation factor 1-alpha 1 GN = EEF1A1 |
| P05387 | NAB | 60S acidic ribosomal protein P2 GN = RPLP2 |
| Q7RTS7 | CA/CK | Keratin, type II cytoskeletal 74 GN = KRT74 |
| P31946 | TS | 14-3-3 protein beta/alpha GN = YWHAB |
| Q13835 | CA/CK | Plakophilin-1 GN = PKP1 |
| P14923 | CA/CK | Junction plakoglobin GN = JUP |
| P09651 | NAB | Heterogeneous nuclear ribonucleoprotein A1 GN = HNRNPA1 |
| P07900 | | Heat shock protein HSP 90-alpha GN = HSP90AA1 |
| Q96KK5 | NAB | Histone H2A type 1-H GN = HIST1H2AH |
| P04406- | CA/CK | Glyceraldehyde-3-phosphate dehydrogenase GN = GAPDH |
| P10412 | NAB | Histone H1.4 GN = HIST1H1E |
| P04792 | | Heat shock protein beta-1 GN = HSPB1 |
| Q9NZT1 | | Calmodulin-like protein 5 GN = CALML5 |
| P81605 | | Dermcidin GN = DCD |
| P27348 | TS | 14-3-3 protein theta GN = YWHAQ |
| P55072 | NAB | Transitional endoplasmic reticulum ATPase GN = VCP |
| Q09666 | NAB | Neuroblast differentiation-associated protein AHNAK GN = AHNAK |
| P23246 | NAB | Splicing factor, proline- and glutamine-rich GN = SFPQ |
| Q15149 | CA/CK | Plectin GN = PLEC |
| Q8NC51 | NAB | Plasminogen activator inhibitor 1 RNA-binding protein GN = SERBP1 |
| P07237 | | Protein disulfide-isomerase GN = P4HB |
| O60437 | CA/CK | Periplakin GN = PPL |
| P01717 | ABP | Ig lambda chain V-IV region Hil |
| P55884 | NAB | Eukaryotic translation initiation factor 3 subunit B GN = EIF3B |
| P11021 | | 78 kDa glucose-regulated protein GN = HSPA5 |
| P01024 | | Complement C3 GN = C3 |
| P04350 | CA/CK | Tubulin beta-4A chain GN = TUBB4A |
| P01857 | ABP | Ig gamma-1 chain C region GN = IGHG1 |
| P61247 | NAB | 40S ribosomal protein S3a GN = RPS3A |
| P62937 | | Peptidyl-prolyl cis-trans isomerase A GN = PPIA |
| O15020 | CA/CK | Spectrin beta chain, non-erythrocytic 2 GN = SPTBN2 |
| P30101 | | Protein disulfide-isomerase A3 GN = PDIA3 |
| Q6KB66 | CA/CK | Keratin, type II cytoskeletal 80 GN = KRT80 |
| Q9UJU6 | CA/CK | Drebrin-like protein GN = DBNL |
| P47914 | NAB | 60S ribosomal protein L29 GN = RPL29 |
| P39023 | NAB | 60S ribosomal protein L3 GN = RPL3 |
| A6NMY6 | CA/CK | Putative annexin A2-like protein GN = ANXA2P2 |
| P60174 | CA/CK | Triosephosphate isomerase GN = TPI1 |
| P35241 | CA/CK | Radixin GN = RDX |
| P07305 | NAB | Histone H1.0 GN = H1F0 |
| P15259 | CA/CK | Phosphoglycerate mutase 2 GN = PGAM2 |
| P0CG05 | ABP | Ig lambda-2 chain C regions GN = IGLC2 |
| Q92817 | CA/CK | Envoplakin GN = EVPL |
| P06733 | NAB | MBP-1 of Alpha-enolase GN = ENO1 |
| P22626 | NAB | Heterogeneous nuclear ribonucleoproteins A2/B1 GN = HNRNPA2B1 |
| P62424 | NAB | 60S ribosomal protein L7a GN = RPL7A |
| P60660 | CA/CK | Myosin light polypeptide 6 GN = MYL6 |
| P04083 | NAB | Annexin A1 GN = ANXA1 |
| Q14134 | NAB | Tripartite motif-containing protein 29 GN = TRIM29 |
| P39019 | NAB | 40S ribosomal protein S19 GN = RPS19 |
| Q8WVV4 | CA/CK | Protein POF1B GN = POF1B |
| Q02878 | NAB | 60S ribosomal protein L6 GN = RPL6 |
| Q9Y6X9 | NAB | MORC family CW-type zinc finger protein 2 GN = MORC2 |
| Q9NQC3 | NAB | Reticulon-4 GN = RTN4 |
| Q5T753 | CA/CK | Late cornified envelope protein 1E GN = CA/CK E |

SBED associated

| | |
|---|---|
| P56202 | Cathepsin W |
| P80188 | Neutrophil gelatinase-associated lipocalin precursor |
| Q13017 | Rho GTPase-activating protein 5 |
| Q6UB98 | Ankyrin repeat domain-containing protein 12 |
| P54753 | Ephrin type-B receptor 3 |
| Q5JRS4 | Olfactory receptor 10J3 |
| P82279 | Protein crumbs homolog 1 |
| O00763 | Acetyl-CoA carboxylase 2 |
| P02533; | Keratin, type 1 cytoskeletal 14, 16 |
| P08779 | |
| P26012 | Integrin beta-8 |
| Q14766 | Latent-transforming growth factor beta-binding protein 1 |

TABLE 11
Band 9

| Accession | | |
|---|---|---|
| number | Class | Protein name |
| P61626 | | Lysozyme C GN = LYZ |
| Q9HCK1 | NAB | DBF4-type zinc finger-containing |
| | | protein 2 GN = ZDBF2 |

TABLE 12
Band 1

| Accession | | |
|---|---|---|
| number | Class | Protein name |
| P01834 | ABP | Ig kappa chain C region GN = IGKC |
| P01765 | ABP | Ig heavy chain V-III region TIL |
| P04003 | NAB | C4b-binding protein alpha chain GN = C4BPA |
| P60709 | CA/CK | Actin, cytoplasmic 1 GN = ACTB |
| Q5T751 | CA/CK | Late cornified envelope protein 1C GN = LCE1C |

TABLE 13
Band 5

| Accession | | |
|---|---|---|
| number | Class | Protein name |
| P01860 | ABP | Ig gamma-3 chain C region GN = IGHG3 |
| O60902 | NAB | Short stature homeobox protein 2 GN = SHOX2 |

TABLE 14
Band 7

| Accession | | |
|---|---|---|
| number | Class | Protein name |
| Q04695 | CA/CK | Keratin, type I cytoskeletal 17 GN = KRT17 |
| Q7Z794 | CA/CK | Keratin, type II cytoskeletal 1b GN = KRT77 |
| Q6KB66 | CA/CK | Keratin, type II cytoskeletal 80 GN = KRT80 |
| P01833 | | Polymeric immunoglobulin receptor GN = PIGR |
| P01042 | | Kininogen-1 GN = KNG1 |
| Q02413 | CA/CK | Desmoglein-1 GN = DSG1 |
| P15924 | CA/CK | Desmoplakin GN = DSP |
| Q8TF72 | | Protein Shroom3 GN = SHROOM3 |
| P02671 | ABP | Fibrinogen alpha chain GN = FGA |
| Q5T749 | CA/CK | Keratinocyte proline-rich protein GN = KPRP |
| Q5VZP5 | | Inactive dual specificity phosphatase 27 GN = |
| | | DUSP27 |
| Q5T751 | CA/CK | Late cornified envelope protein 1C GN = LCE1C |
| Q9UL12 | | Sarcosine dehydrogenase, mitochondrial GN = |
| | | SARDH |
| P00698 | | Lysozyme C OS = Gallus gallus GN = LYZ |
| Q8N114 | | Protein shisa-5 GN = SHISA5 |

TABLE 15
Band 15

| Accession | | |
|---|---|---|
| number | Class | Protein name |
| P08238 | | Heat shock protein HSP 90-beta GN = HSP90AB1 |
| P68104 | NAB | Elongation factor 1-alpha 1 GN = EEF1A1 |
| P02675 | ABP | Fibrinogen beta chain GN = FGB |
| Q8TF72 | | Protein Shroom3 GN = SHROOM3 |
| P0CG05 | ABP | Ig lambda-2 chain C regions GN = IGLC2 |
| P78386 | CA/CK | Keratin, type II cuticular Hb5 GN = KRT85 |
| Q7Z5Y6 | | Bone morphogenetic protein 8A GN = BMP8A |
| O14633 | CA/CK | Late cornified envelope protein 2B GN = LCE2B |

TABLE 16
Band 17

| Accession | | |
|---|---|---|
| number | Class | Protein name |
| P02538 | CA/CK | Keratin, type II cytoskeletal 6A GN = KRT6A |
| P01834 | ABP | Ig kappa chain C region GN = IGKC |
| P06702 | | Protein S100-A9 GN = S100A9 |
| P68104 | NAB | Elongation factor 1-alpha 1 GN = EEF1A1 |
| P01024 | | Complement C3 GN = C3 |
| P81605 | | Dermcidin GN = DCD |
| P05109 | | Protein S100-A8 GN = S100A8 |
| Q5T751 | CA/CK | Late cornified envelope protein 1C GN = LCE1C |

TABLE 17
Band 19

| Accession | | |
|---|---|---|
| number | Class | Protein name |
| P02768 | NAB | Serum albumin GN = ALB |
| P0CG05 | ABP | Ig lambda-2 chain C regions GN = IGLC2 |
| P06702 | | Protein S100-A9 GN = S100A9 |
| P08238 | | Heat shock protein HSP 90-beta GN = HSP90AB1 |
| P60709 | CA/CK | Actin, cytoplasmic 1 GN = ACTB |
| P13647 | CA/CK | Keratin, type II cytoskeletal 5 GN = KRT5 |
| P01616 | ABP | Ig kappa chain V-II region MIL |
| Q86YZ3 | CA/CK | Homerin GN = HRNR |
| P01857 | ABP | Ig gamma-1 chain C region GN = IGHG1 |
| P62805 | NAB | Histone H4 GN = HIST1H4A |
| P59665 | | Neutrophil defensin 1 GN = DEFA1 |
| P61626 | | Lysozyme C GN = LYZ |
| P01024 | ABP | Complement C3 GN = C3 |
| Q8TF72 | | Protein Shroom3 GN = SHROOM3 |
| P83593 | ABP | Ig kappa chain V-IV region STH (Fragment) |
| P01700 | ABP | Ig lambda chain V-I region HA |
| P01877 | ABP | Ig alpha-2 chain C region GN = IGHA2 |
| Q9UL12 | | Sarcosine dehydrogenase, mitochondrial GN = |
| | | SARDH |
| Q6NXT2 | NAB | Histone H3.3C GN = H3F3C |
| P02788 | NAB | Lactotransferrin GN = LTF |
| P02787 | ABP | Serotransferrin GN = TF |

[0878] Certain proteins were identified in multiple bands. For example, IGLC2 was identified in bands 3, 15 and 19 and SHROOM3 was identified in bands 7, 15, 19. This may be due to degradation products, isoforms or the like. These experiments identified 108 proteins (plus 2 lysozyme controls), comprising among others 34 Nucleic Acid Binding Proteins (NAB) where 7 of the 34 are putative tumor suppressors/repressors; 37 cell adhesion/cytoskeletal (CA/CK); and 14 abundant plasma proteins (ABP). All of the tumor suppressors/repressors are DNA/RNA binding proteins. Other proteins comprise chaperones, signaling molecules etc.

[0879] The biomarkers in this Example can be used to detect microvesicles that are indicative of cancer or non-cancer samples.

### Example 16: Identification of Biomarkers Through Affinity Enrichment with an Enriched Oligonucleotide Library and Mass Spectrometry

[0880] This Example continues upon the Example above. Identification of protein-protein and nucleic acid-protein complexes by affinity purification mass spectrometry (AP-MS) can be hampered in samples comprising complex mixtures of biological components (e.g., bodily fluids including without limitation blood and derivatives thereof). For example, it may be desirable to detect low abundance protein and nucleic acid-protein complexes in a complex milieu comprising various components that may interact promiscuously with specific binding sites such as high abundance proteins that interact non-specifically with the affinity resin. AP-MS has been used previously to enrich for pre-identified targets of interest using individual DNA or RNA aptamers or specific nucleic acid binding domains. In this Example, an enriched oligonucleotide probing library was used as the affinity reagent. This approach combined with mass spectrometry enables the identification of differentially expressed biomarker from different disease states or cellular perturbations without relying on a priori knowledge of the targets of interest. Such biomarker may comprise proteins, nucleic acids, miRNA, mRNA, carbohydrates, lipid targets, combinations thereof, or other components in a biological system.

[0881] The method comprises identification of an enriched oligonucleotide probe library according to the methods of the invention followed by target identification with affinity purification of the bound probing library and mass spectrometry. The members of the enriched oligonucleotide probing library comprise an affinity tag. A biological sample is probed with the oligonucleotide probe library, affinity purification of the oligonucleotide probe library via the affinity tag is performed which will accordingly purify biological entities in complex with various members of the probe library, and read-out of targets that purified with the members of the probe library is performed using liquid chromatography-tandem mass spectrometry (LC-MS/MS) for proteins or oligonucleotide targets (e.g., miRNA or mRNA) with next generation sequencing (NGS). Confirmation of protein targets is performed using quantitative mass spectrometry (MS), e.g., using MRM/SRM or SWATH based methods.

[0882] The method of the Example lends itself to various options. For example, any appropriate affinity tags can be used for affinity pull-down, including without limitation anti-sense oligonucleotides, biotin, polyhistidine, FLAG octapeptide (i.e., N-DYKDDDDK-C(SEQ ID NO. 134), where N stands for Amino-terminus and C stands for Carboxy terminus), 3×FLAG, Human influenza hemagglutinin (HA)-tag (i.e., N-YPYDVPDYA-C(SEQ ID NO. 135)), myc-tag (N-EQKLISEEDL-C(SEQ ID NO. 136)), other such as known in the art, and combinations thereof. Similarly, any appropriate enrichment support can be used in addition to the magnetic streptavidin beads exemplified herein, including without limitation other bead systems, agarose beads, planar arrays or column chromatography supports. It follows that the various supports can be coupled with the various affinity reagents appropriate for the oligonucleotide library, including without limitation streptavidin, avidin, anti-His tag antibodies, nickel, and the like. The different affinity tags and supports can be combined as desired. This Example used cross-linking but in certain cases such cross-linking is not necessary and may even be undesirable, e.g., to favor identification of high affinity complex formation. When cross-linking is desired, any appropriate cross-linkers can be used to carry out the invention, including BS2G, DSS, formaldehyde, and the like. Other appropriate cross-linkers and methods are described herein. See, e.g., Section “Aptamer Target Identification.” Lysis buffers and wash stringencies can be varied, e.g., depending on whether complexes are cross-linked or not. Less stringent lysis/wash conditions may produce a wider array of potential protein complexes of interest whereas more stringent lysis/wash conditions may favor higher affinity oligo-target complexes and/or targets comprising specific proteins (e.g., by disassociating larger complexes bound to the oligos). One of skill will further appreciate that qualitative and/or quantitative LC-MS/MS may be used for target detection and verification. Similarly, metabolic labeling and label-free approaches may be used for quantitative MS, including without limitation spectral counting, SILAC, dimethyl labeling, TMT labeling, Targeted MS with SRM/MRM or SWATH, and the like.

### REFERENCES

[0883] Vickenborg et al. “Aptamer based affinity labeling of proteins”, Angew Chem Int. 51(36):9176-80 (2012).
[0884] Tacheny, M, Arnould, T., Renard, A. “Mass spectrometry-based identification of proteins interacting with nucleic acids”, Journal of Proteomics 94; 89-109 (2013).
[0885] Faoro C and Ataide S F. “Ribonomic approaches to study the RNA-binding proteome.”, FEBS Lett. 588(20):3649-64 (2014).
[0886] Budayeva H G, Cristea, I M, “A mass spectrometry view of stable and transient protein inteeractions.” Adv Exp Med Biol. 806:263-82 (2014).

### Example 17: Protocol for Affinity Capture Using Oligonucleotide Probing Library

[0887] This Example presents a detailed protocol for the method of affinity capture using an oligonucleotide probing library presented in the Example above.

[0888] Protocol:

[0889] The oligonucleotide probe library comprises F-TRin-35n-B-8-3s described herein either desthiobiotin labeled or unlabeled library and binding to normal (i.e., non-cancer) female plasma. The oligonucleotide probe library is enriched against the plasma samples as described elsewhere (e.g., in Example 13). The plasma samples are processed separately against the desthiobiotin labeled or unlabeled oligonucleotide libraries. General parameters included the following:

[0890] 48 normal plasma samples are pooled for enrichment of each oligonucleotide library (Desthiobiotin or Unlabeled)

[0891] 200 μl input plasma per sample

[0892] Ultracentrifugation (UC) is used to pre-clear the samples

[0893] 5 ng of each aptamer library is added to each sample

[0894] Binding competitors for all library samples include 0.01 mM dextran sulfate, 340 ng for tRNA and 340 ng Salmon sperm DNA as described elsewhere herein

[0895] 6% PEG 8000 is used for precipitation of microvesicles within the samples

[0896] Affinity purification is performed with C1 Streptavidin beads (MyOne Streptavidin Beads C1-65001, lot 2 ml (10 mg/ml))

[0897] Buffers:

[0898] Plasma dilution: 6 mM MgCl2 in 2×PBS

[0899] Pellet Wash Buffer: 1×PBS, 3 mM MgCl2

[0900] PEG Ppt Buffer: 20% Peg8000 in 1×PBS, 3 mM MgCl2

[0901] Bead Prep Buffer: 1×PBS containing 0.01% Triton X-100

[0902] Lysis Buffer: prepare a 2× stock solution consisting of 100 mM Tris-HCl, 20 mM MgCl2, 400 mM NaCl, 1% Triton X-100, 10% glycerol, pH 7.5. Diluted to 1× with water 1:1 prior to using.

[0903] AP Wash buffer 1: 10 mM Tris-HCl, 1 mM EDTA, 2M NaCl, 1% Triton X-100, pH 7.5

[0904] AP wash buffer 2: 10 mM Tris-HCL, 1 mM EDTA, 2M NaCl, 0.01% Triton X-100, pH 7.5

[0905] Biotin Elution buffer 1: 5 mM Biotin, 20 mM Tris, 50 mM NaCl, pH 7.5

[0906] 1×LDS, 1× Reducing buffer 2

[0907] Reagent/Instrument Prep:

[0908] Pre-chill Ultracentrifuge to 4° C.

[0909] Protease inhibition: dissolve 2 tablets of “cOmplete ULTRA MINI EDTA-free EASYpack” protease inhibitor in 1100 μl of H2O (20× stock of protease inhibitor).

[0910] Plasma Preparation (for Each of Desthiobiotin or Unlabeled Oligonucleotide Libraries):

[0911] 1. Add 50 μl of protease inhibitor to each ml of sample (on top of frozen plasma) in a room temperature (RT) water bath. Will use 22 mls of pooled plasma, so 1100 μl inhibitor.

[0912] 2. To remove cell/debris, spin samples at 7500×g 20 min, 4° C. in the Ultracentrifuge.

[0913] 3. Collect the supernatant, pool and measure volume & record.

[0914] 4. Add an equal volume of 2×PBS, 6 mM MgCl₂ to the plasma.

[0915] 5. Label low-retention eppendorf tubes 1-96.

[0916] 6. Transfer 400 μl of each sample to eppendorf tubes based on appropriate tube map

[0917] 7. Using an electronic P200, add competitors: 8.6 μl of 40 ng/μl Salmon sperm DNA; 8.6 μl of 40 ng/μl tRNA; 8.6 μl of 0.5×S1.

[0918] 8. Incubate at RT with end over end rotation for 10 min.

[0919] 9. Add 10 μL of appropriate oligo library, mix well. Save any leftover diluted library for gel control (see below).

[0920] 10. Incubate 1 hr at RT with end over end rotation.

[0921] 11. Using an electronic repeat P100, add 187p of 20% PEG 8000 to sample for a final 6% concentration to the 435.5 μl of sample/oligo library. Invert a few times to mix and incubate for 15 min at 4° C.

[0922] 12. Spin each sample in table top centrifuge at 10,000×g for 5 min.

[0923] 13. Remove supernatant and discard, add 1 ml 1×PBS, 3 mM MgCl₂ to pellet.

[0924] 14. Wash pellet by gentle inversion

[0925] 15. Remove buffer, re-suspend pellets in 100 μl 1×PBS, 3 mM MgCl₂: incubate at RT for 10 min on mixmate @ 900 rpm to re-suspend. Make sure each sample is well re-suspended by pipetting.

[0926] 16. Pool all desthiobiotin library samples into one 50 ml falcon tube, and the unlabeled library into another, total volume for each should be 4800 μl.

[0927] 17. Take 10 μL aliquot for the input into AP sample for gel (add 10 μL of 2×LDS buffer w/2× reducing agent.

[0928] Affinity Purification:

[0929] 18. Prepare 10 μL of MyOne Strep-coated Magnetic beads per each condition into a 1.5 ml eppendorf tube and place on a magnetic bead rack. Have a Bead only control as well (n=3)

[0930] 19. Remove supernatant and wash 1×500 μl with Bead buffer.

[0931] 20. Discard supernatant

[0932] 21. Resuspend beads in an equal volume of 1×PBS, 3 mM MgCl₂ (equal vol to what was taken out originally=10 μl)

[0933] 22. Add the 10 μl of beads directly to the 4780 μL from step 19. To Bead only control add PBS.

[0934] 23. Incubate samples with streptavidin beads 1 hr RT on plate shaker (taped).

[0935] 24. Place on the large magnetic stand for 1 min and remove supernatant

[0936] 25. Add 1.5 mL of 1× lysis buffer to the samples (do 3×500 μl with a good rinse of the 50 mL falcon tube for each to collect all the beads) and transfer to a new set of eppendorf tubes.

[0937] 26. Incubate for 20 min on ice.

[0938] 27. Place tubes in magnetic bead rack, let equilibrate 1 min and remove the supernatant.

[0939] 28. Wash the beads with wash buffer #1 via vortexing. Resuspend well.

[0940] 29. Place tubes on magnetic bead rack, let equilibrate 1 min and remove the supernatant

[0941] 30. Wash 2 additional times as with wash buffer #1 steps 27-29 (total 3 washes with wash buffer #1)

[0942] 31. Repeat steps 27-29 (2) additional times with wash buffer #2

[0943] 32. During the last wash transfer beads to a new eppendorf tube. (to reduce non-specific binding)

[0944] 33. Do one dry spin to make sure all residual wash buffer is removed.

[0945] 34. Add 10 μl of Biotin Elution buffer 1 to beads

[0946] 35. Incubate for 15 minutes at 37° C.

[0947] 36. Place on magnetic stand for 1 min, collect sup and transfer to a new tube, add 10 μL of 2×LDS, 2× Reducing agent to eluted sample. Save as Elution #1.

[0948] 37. Add 10 μl of 1×LDS Sample Buffer, 1× Reducing buffer to magnetic beads.

[0949] 38. Boil the samples for 15 min at 90° C. The boiling time is 15 minutes to essure the streptavidin on the beads unfolds and releases the biotinylated aptamer-protein complex.

[0950] 39. Place samples on magnetic stand on ice and collect the eluted sample. This is Elution #2. Discard the beads.

[0951] 40. Gel 1 layout:

[0952] Lane 1: 5 ng Desthiobiotin library

[0953] Lane 2: 1×LDS

[0954] Lane 3: Marker

[0955] Lane 4: Desthiobiotin Elution #1

[0956] Lane 5: Unlabeled Elution #1

[0957] Lane 6: Bead only Elution #1

[0958] Lane 7: Desthiobiotin Elution #2

[0959] Lane 8: Unlabeled Elution #2

[0960] Lane 9: Bead only Elution #2

[0961] Lane 10: Input for AP (saved from step 17)

[0962] Running Reducing SDS Gel:

[0963] Prepare 1×MOPS SDS Running Buffer from 20×MOPS SDS Buffer

[0964] Use 10 or 12 well 4-12% Bis Tris gel

[0965] Peel off tape seal and place in the gel box. Insert spacer for second gel cassette if needed

[0966] Fill the inside/upper chamber with running buffer MOPS (IX) and 500 ul Antioxidant

[0967] Remove the comb carefully, not disturbing the wells

[0968] Rinse the wells with the running buffer to remove the storage buffer which can interfere with sample running

[0969] Slowly load samples to each well carefully using L-20 tip

[0970] Fill the outer/lower chamber with approximately 600 ml of running buffer MOPS (IX)

[0971] Place top portion of unit and secure correct electrodes

[0972] Run the gel to migrate proteins

[0973] 100 V constant for samples to move through stack (until all samples line up) for 15 min

[0974] Increase to 150 V constant for running (until visible sample buffer comes to bottom) for ˜1 hr

[0975] At the end of the run, stop the power supply and remove the gel cassettes from cell

[0976] Disassemble the gel cassette by with gel knife.

[0977] Remove one side of cassette case. Trim off the gel foot and wells (avoid drying gel).

[0978] Transfer gel into container filled with Mili Q water and perform a quick wash.

[0979] Silver staining:

[0980] Materials:

[0981] ProteoSilver TMSilver Stain Kit, Sigma Catalog No. PROT-SIL1, Lot No. SLBJ0252V

[0982] Ethanol, Fisher Scientific Catalog No. BP2818-4, Lot No. 142224

[0983] Acetic acid, Acros organics Catalog No. 14893-0025, Lot No. B0520036

[0984] Water, Sigma Catalog No. W4502, Lot No. RNBD1581

[0985] Preparation:

[0986] 1. Fixing solution. Add 50 ml of ethanol and 10 ml of acetic acid to 40 ml of ultrapure water.

[0987] 2. 30% Ethanol solution. Add 30 ml of ethanol to 70 ml of ultrapure water.

[0988] 3. Sensitizer solution. Add 1 ml of ProteoSilver Sensitizer to 99 ml of ultrapure water. The prepared solution should be used within 2 hours. A precipitate may form in the ProteoSilver Sensitizer. This precipitate will not affect the performance of the solution. Simply allow the precipitate to settle and remove 1 ml of the supernatant.

[0989] 4. Silver solution. Add 1 ml of ProteoSilver Silver Solution to 99 ml of ultrapure water. The prepared solution should be used within 2 hours.

[0990] 5. Developer solution. Add 5 ml ProteoSilver Developer 1 and 0.1 ml ProteoSilver Developer 2 to 95 ml of ultrapure water. The developer solution should be prepared immediately (<20 minutes) before use.

[0991] 6. All steps should be carried out in the hood and waste needs to be collected in toxic designated container.

[0992] Procedure

[0993] A. Direct Silver Staining

[0994] All steps are carried out at room temperature on an orbital shaker at 60 to 70 rpm.

[0995] 1. Fixing—After electrophoresis of the proteins in the mini polyacrylamide gel, place the gel into a clean tray with 100 ml of the Fixing solution overnight in the hood. Cover tightly.

[0996] 2. Ethanol wash—Decant the Fixing solution and wash the gel for 10 minutes with 100 ml of the 30% Ethanol solution.

[0997] 3. Water wash—Decant the 30% Ethanol solution and wash the gel for 10 minutes with 200 ml of ultrapure water.

[0998] 4. Sensitization—Decant the water and incubate the gel for 10 minutes with 100 ml of the Sensitizer solution.

[0999] 5. Water wash—Decant the Sensitizer solution and wash the gel twice, each time for 10 minutes with 200 ml of ultrapure water.

[1000] 7. Silver equilibration—Decant the water and equilibrate the gel for 10 minutes with 100 ml of the Silver solution.

[1001] 8. Water wash—Decant the Silver solution and wash the gel for 1 to 1.5 minutes with 200 ml of ultrapure water.

[1002] 9. Gel development—Decant the water and develop the gel with 100 ml of the Developer solution. Development times of 3 to 7 minutes are sufficient to produce the desired staining intensity for most gels. Development times as long as 10 to 12 minutes may be required to detect bands or spots with very low protein concentrations (0.1 ng/mm2).

[1003] 10. Stop—Add 5 ml of the ProteoSilver Stop Solution to the developer solution to stop the developing reaction and incubate for 5 minutes. Bubbles of CO₂ gas will form in the mixture.

[1004] 11. Storage—Decant the Developer/Stop solution and wash the gel for 15 minutes with 200 ml of ultrapure water. Store the gel in fresh, ultrapure water and take picture for documentation.

[1005] Protein identification

[1006] Protein bands of interest were excised from the gradient gels and subjected to liquid chromatography-tandem mass spectrometry (LC-MS/MS) as above.

### Example 18: Oligonucleotide Probes: Breast Cancer Versus Non-Cancer

[1007] This Example presents breast cancer oligonucleotide probes identified in a library enriched against balanced fractions pool of plasma-derived microvesicles from patients with 50% aggressive cancer. General methodology is as presented in Example 13 above. The samples comprised pools of 30 each of breast cancer patient plasma and healthy plasma (i.e., non-cancer controls). A set of cancer specific aptamers was identified where each aptamer has a fold change exceeding two when compared to either the healthy plasma pool (normal and non-cancer) or process control (no negative selection enriched library).

[1008] Methodology

[1009] The F-TRin-35n-B 8-3s library as described herein was enriched against microvesicles from the plasma samples. See Example 13 with the modifications noted below. The screened library comprised a 5′ region (5′ CTAGCATGACTGCAGTACGT 3′ (SEQ ID NO. 131)) followed by the random naïve aptamer sequences and a 3′ region (5′ CTGTCTCTTATACACATCTGACGCTGCCGACGA (SEQ ID NO. 132)). In the previous enrichment protocol in Example 13, positive, negative and positive selections were performed before each cycle of PCR to re-amplify the library. But in the current enrichment protocol, the aptamer library was purified with streptavidin beads after each selection and the beads were directly used for PCR amplification. Also as compared to prior experiments, the new sample pool for aptamer enrichment was balanced for different plasma fractions and collection vial for each of cancer, non-cancer and normal patients. Specifically, plasma was initially collected in 4 tubes from each patient, each of those 4 tubes were split into 3 aliquots, resulting in 12 aliquots from each patient. For example, a 1st tube out of the 4 results in aliquots 1A, 1B and 1 C, the same split is repeated for the other three aliquots, which results in 12 aliquots from each patient (1A-C, 2A-C, 3A-C, 4A-C). Correspondingly, a pool of 60 patients consists of each variant repeated 5 times (5×12). Enrichment was done according to the selection methodology outlined above, where the library was PCR amplified after each binding round for 7 rounds, which include 3 positive selections against cancer-derived samples, 3 negative selections against controls, and a final positive selection. The enriched library was subjected to the probing test on cancer and healthy pools of plasma samples. There was a subset of 296 cancer specific aptamers, which have a relatively higher read count and fold change >2 as compared to healthy pool and process control. The detailed protocol is as follows:

[1010] Equipment & Supplies

[1011] 1×PBS (HiClone): SH30256.01, Lot #: AZC186921, bottle#1476, exp. May 2016. Supplemented with 3 mM MgCl₂ (4227844, USB) in steps 6, 7, 11.

[1012] Table Top centrifuge: 0363

[1013] 20×S1: Aptamer Science TT 070214, LN: 14F-01-S1, exp. 2015-06

[1014] PEG8000—lot #SLBJ9928V cat #91458, protease inhibitor Ref—05892791, Water—ref 10977-015, lot #1606173

[1015] 2×PBS+6 mM MgCl₂-PBS (Sigma)—SLBK2636V, Water—RNBD2918, MgCl₂-4227844 (USB). Used in steps: 5, 9.

[1016] Stock yeast tRNA (Ambion)—lot #1406019. Salmon DNA (Invitrogen)—lot #1617974

[1017] Starting solution comprises 5 ng Non-Enriched F-Trin-35n-B aptamer library, 300 ul of plasma, 0.0 1×S1+0.8 ng/ul Salmon DNA/tRNA (competitor DNAs), 6% PEG8000 (to precipitate microvesicles); final volume 600 ul.

[1018] Round 1 (1st positive enrichment)

[1019] Step 1: Pre-chill tabletop centrifuge at 4° C.

[1020] Step 2: Protease inhibition: dissolve 1 tablet of “cOmplete ULTRA MINI EDTA-free EASYpack” protease inhibitor in 550 ul of H2O (20× stock of protease inhibitor).

[1021] Step 3: Add 50 ul of protease inhibitor to the sample (on top of frozen plasma) and start thawing: 1 ml total ea.

[1022] Step 4: Cell spin: To remove cells/debris, spin samples at 10,000×g, 20 min, 4° C. Collect the entire volume of supernatant (SN) without disturbing the pellet.

[1023] Step 5: Mix SN from step 4 with equal volume of 2×PBS 6 mM MgCl₂, collect 600 ul ea into 2 ml Fisher Low binding tubes for use in step 6. Store remaining sample at 4° C. for the following rounds.

[1024] Step 6: Blocking: Add competitors in order: 1) Salmon DNA Stock; 2) tRNA; 3) S1. Make dilutions to desired concentration (see starting solution above) in 1×PBS, 3 mM MgCl2, mix well. Incubate for 10 min at room temperature (RT), end-over-end rotation.

[1025] Step 7: Binding: Add ssDNA Probing library to the final concentration 12.5 pg/ul for binding. Make dilutions in 1×PBS, 3 mM MgCl₂.

[1026] Step 8: Precipitation: Add buffer (20% PEG8000 in 1×PBS with 3 mM MgCl₂) to sample to the final PEG concentration 6%.

[1027] Step 9: Spin at 10,000×g for 5 min, RT.

[1028] Step 10: Wash: Remove SN, add 1 ml 1×PBS, 3 mM MgCl2 and wash pellet by gentle invertion with 1 ml aptamer buffer.

[1029] Step 11: Resuspension: Remove buffer, Re-suspend pellets in 200 ul H2O: incubate at RT for 10 min on mixmate 900 rpm. Ensure each sample is re-suspended by pipeting after step 11.

[1030] Step 12: Purification: Aptamers elution from PEG/Protein pellet with Streptavidin beads (Dynabeads #65001: Dynabeads® MyOne™ Streptavidin C1):
[1031] ->Beads stock: 10 mg/ml; Capacity: >2,500 pmoles/mg;
[1032] ->10 ul beads should bind 250 pmoles Biotin
[1033] ->3 ul beads for each aptamer library (AL) sample can bind 75 pmoles Biotin
[1034] Library input in the protocol above is ˜5 ng, which is 0.17 pmol
[1035] 12.1) Pre-washing Streptavidin Magnetic Beads:
[1036] 12.1.1 Add 10 uL of Streptavidin Magnetic Beads into 1.5 mL microcentrifuge tube (3 ul×2 samples+overage)
[1037] 12.1.2 Place the tube into a magnetic stand to collect the beads against the side of the tube. Remove and discard the supernatant.
[1038] 12.1.3 Add 0.5 mL of Wash Buffer (1×PBS with 0.1% Tween 20) to the tube.
[1039] Invert the tube several times or vortex gently to mix. Collect the beads with a magnetic stand, then remove and discard the supernatant.
[1040] 12.1.4 Wash once with 0.5 ml 1×PBS, collect the beads with a magnetic stand, then remove and discard the supernatant.
[1041] 12.1.5 Add 35 ul 1×PBS to tubes. Aliquot into 10 ul per well (using repeater pipet) in 1.5 ml Fisher low-binding tubes. Add 40 ul of 1×PBS.
[1042] 12.2) Incubate 100 ul of sample, recovered in step 12, at 50° C. for 10 min (mixmate, 500 rpm) (to denature/remove protein/PEG from aptamer library)
[1043] 12.3) Sample Binding:
[1044] 12.3.6 Add heat denatured samples to beads (aliquoted in step 5).
[1045] 12.3.7 Incubate for 30 min, 37° C., mixmate at 800 rpm. Spin down at 2000 rpm for 20 sec.
[1046] 12.3.8 Collect the beads (with bound aptamers) using magnet and remove the supernatant by multichannel pipet.
[1047] 12.3.9 Take tubes off the magnet, add 300 ul of 1×PBS, pipet well. Collect the beads with magnetic stand, then remove supernatant.
[1048] 12.3.10 Add 100 ul H2O to resuspend beads by multichannel pipet.
[1049] 12.3.11 Block the beads with Biotin: add 7.5 ul from 10 uM stock, incubate 15 min, RT, 800 rpm.
[1050] 12.3.12 Collect the beads (with bound aptamers) using magnet and remove the supernatant by multichannel pipet. Take tubes off the magnet, add 200 ul of 1×PBS, pipet well. Collect the beads with magnetic stand, then remove supernatant.
[1051] 12.3.13 Add 100 ul H2O

[1052] Step 13: Use beads with bound aptamer library directly in re-AMP PCR (3×33 ul)

[1053] Step 14: Agarose gel
[1054] SYBR Gold gel lot #: H204044-01
[1055] 2 ul of sample+8 ul of loading buffer. Run for 10 cycles
[1056] If no dsDNA bands appear, run additional 3 cycles
[1057] Optional: if PCR product has non-specific bands, perform gel cut.

[1058] Step 15: dsDNA purification with Nucleospin column (NTI binding buffer):
[1059] 2× volume of buffer NTI per sample volume (600 ul NTI to 300 ul sample)
[1060] combine 3 wells per column
[1061] 5 min elution in 30 ul NE buffer, RT. Add 20 ul of NE after elution.

[1062] Step 16: Optional: Gel, SybrGold, Agarose: to verify product with correct size is observed

[1063] Step 17: Quantify dsDNA (QuBit, Life Technologies) (keep 5 ul of dsDNA as control for gel later)

[1064] Step 18: Lambda digestion at 37 C for 2 h; heat inactivation at 80 C for 10 min.

[1065] Step 19: ssDNA purification with Nucleospin column (NTC binding buffer).
[1066] combine 3 samples per column
[1067] elution: 5 min in 30 ul NE buffer, RT

[1068] Step 20: Quantify dsDNA (QuBit, Life Technologies) ssDNA (5 ul)

[1069] Step 21: Gel ssDNA: load between 2 ng and 10 ng

[1070] Round 2 (2d positive enrichment)

[1071] Repeat protocol starting from step 6 above, using diluted plasma samples stored in step 5. All steps are the same except for step 7. Input of library is 5 times less

[1072] Step 7: Binding: Add ssDNA Probing library to the final concentration 2.5 pg/ul for binding. Make dilutions in 1×PBS, 3 mM MgCl2.

[1073] Steps 6-13: As above. Use entire 100 ul of re-suspended sample to re-amplify via PCR

[1074] Steps 14-20: ssDNA preparation as above.

[1075] Round 3 (3rd positive enrichment)

[1076] Repeat steps as shown for round 2

[1077] Round 4 (Negative enrichment)

[1078] Make sure to use correct negative samples (e.g., non-cancer sample in the case of positive cancer selection above, or vice versa)

[1079] Steps 1-9: Repeat as in Round 2 above (ssDNA input is 2.5 pg/ul).

[1080] Step 10: Collect SN (˜900 ul) and discard pellet after PEG precipitation.

[1081] Step 11: Resuspention: Not needed in this step

[1082] Step 12: Purification: Aptamers elution from PEG/Protein pellet with Streptavidin beads (Dynabeads #65001: Dynabeads® MyOne™ Streptavidin C1):
[1083] ->Beads stock: 10 mg/ml; Capacity: >2,500 pmoles/mg;
[1084] ->10 ul beads should bind 250 pmoles Biotin
[1085] ->3 ul beads for each AL sample can bind 75 pmoles Biotin
[1086] Library input in the protocol above is ˜5 ng, which is 0.17 pmol
   [1087] CHANGE FOR SN->For each sample, split 900 ul SN collected in step 10 above into two aliquots 450 ul ea, consider 3 ul of beads per each aliquot.
[1088] 12.1) Pre-washing Streptavidin Magnetic Beads:
[1089] 12.1.1 Add 30 uL of Streptavidin Magnetic Beads into 1.5 mL microcentrifuge tube. Four samples make 8 aliquots (for beads treatment)×3 ul beads+overage.
[1090] 12.1.2 Place the tube into a magnetic stand to collect the beads against the side of the tube. Remove and discard the supernatant.
[1091] 12.1.3 Add 0.5 mL of Wash Buffer (1×PBS with 0.1% Tween 20) to the tube.
[1092] Invert the tube several times or vortex gently to mix. Collect the beads with a magnetic stand, then remove and discard the supernatant.
[1093] 12.1.4 Wash 1 time with 0.5 ml 1×PBS, collect the beads with a magnetic stand, then remove and discard the supernatant.
[1094] 12.1.5 Add 105 ul 1×PBS to tubes. Aliquot into 10 ul per well (using repeater pipet) in 1.5 ml Fisher low-binding tubes. Add 40 ul of 1×PBS.
[1095] 12.2) Incubate 900 ul of sample, recovered in step 10, at 50° C. for 10 min (mixmate, 500 rpm) (to denature/remove protein/PEG from aptamer library)
[1096] 12.3) Sample Binding:
[1097] 12.3.6 Add 1/2 (450 ul) heat denatured samples to beads (aliquoted in step 5).
[1098] 12.3.7 Incubate for 30 min, 37° C., end-over-end rotation. Spin down at 2000 rpm for 20 sec.
[1099] 12.3.8 Collect the beads (with bound aptamers) using magnet and remove the supernatant by multichannel pipet.
[1100] 12.3.9 Take tubes off the magnet, add 300 ul of 1×PBS, pipet well. Collect the beads with magnetic stand, then remove supernatant.
[1101] 12.3.10 Add 100 ul H2O to resuspend beads by multichannel pipet.
[1102] 12.3.11 Block the beads with Biotin: add 7.5 ul from 10 uM stock, incubate 15 min, RT, 800 rpm.
[1103] 12.3.12 Collect the beads (with bound aptamers) using magnet and remove the supernatant by multichannel pipet. Take tubes off the magnet, add 200 ul of 1×PBS, pipet well. Collect the beads with magnetic stand, then remove supernatant.
[1104] 12.3.13 Add 100 ul H2O per purification sample (total 200 ul per negative enrichment sample)
[1105] 12.3.14 Split each sample into 3 aliquots (33 ul each), this results into 6 wells per enrichment sample.

[1106] Step 13: Perform PCR

[1107] Rounds 5, 6: same as round 4

[1108] Round 7: repeats steps as shown for round 2

[1109] Results

[1110] FIGS. 10A-B are scatter plots showing high correlation of frequencies between replicates of cancer pool (FIG. 10A) and appearance of cancer specific subset of aptamers when cancer and healthy pools are compared (circled region in FIG. 10B). FIGS. 10C-F are scatter plots showing the appearance of cancer specific subset of aptamers when the cancer pool profile of the enriched library (i.e., C-RN7) was compared to the cancer pool of the process control library (CP; FIG. 10C) and healthy pool profile of process control library (HP; FIG. 10D). We did not observe a similar subset when the healthy pool profile (C-RN7 v HP) of the enriched library was compared to both variants of profile of process control (FIGS. 10E-F, see points along x-axis).

[1111] Selections of aptamer sequences identified in the enrichment screening are shown in Table 18. In the table, each complete aptamer sequence is assembled from 5′ to 3′ as a 5′ region, the variable region, and 3′ region. The sequences are indicated 5′ to 3′ from left to right, wherein each complete sequence consists of a 5′ leader sequence 5′-CTAGCATGACTGCAGTACGT (SEQ ID NO. 131) followed by the indicated Variable Region sequence followed by the 3′ tail sequence 5′-CTGTCTCTTATACACATCTGACGCTGCCGACGA (SEQ ID NO. 132). The top 50 Cancer-Specific Sequences each had a relatively high copy number in these experiments and a cancer/normal copy number ratio of at least 2-fold higher in the cancers. Moderate Control Sequences had mid-level copy number and a cancer/normal copy number difference of 0.8-1.2-fold. Negative Control Sequences have low copy numbers and cancer/normal copy number ratio of ˜1.0 (i.e., no significant difference).

TABLE 18
Cancer-Specific Sequences

| | Variable Region SEQ ID NO. |
|---|---|
| Cancer-Specific Sequences | 137-186 |
| Moderate Control Sequences | 187-211 |
| Negative Control Sequences | 212-236 |

[1112] The data described above (i.e., FIGS. 10A-F and Table 18) were obtained with 1 ng input of the specified oligonucleotide libraries used to probe the various samples. In addition, probing experiments were performed with lower titers of the C-R7N oligonucleotide library, specifically 0.1, 0.01, 0.001 and 0.0001 ng. A total of 826 unique oligonucleotide sequences were detected between all titers. An eighth enrichment round (round 8) was performed with four titers of the library C-R7N-1 (i.e., 1 ng input in round 7): 1, 0.1, 0.01 and 0.001 ng input. From each titer, sets of oligonucleotides that passed the same filters described above were obtained. The composite set of oligonucleotides was compared to the sets of oligonucleotides obtained from the titrations of the C-R7N library noted above. The variable regions of 733 oligonucleotides observed in at least two of the five sets of oligonucleotides are listed in rank order by occurrence in SEQ ID NOs. 237-969. These oligonucleotides were identified as oligonucleotide probes that selectively bind to cancer samples. As in Table 18, the oligonucleotides were synthesized with a 5′ region consisting of the sequence (5′-CTAGCATGACTGCAGTACGT (SEQ ID NO. 131)) and a 3′ region consisting of the sequence (5′-CTGTCTCTTATACACATCTGACGCTGCCGACGA (SEQ ID NO. 132)) flanking the variable regions. The 733 cancer specific sequences which can be used to identify cancer samples along with those in Table 18 above.

[1113] As noted, next generation sequencing technologies can be used to identify and quantify members of the oligonucleotide library that bind to a sample. We also designed probes that can be used to identify and quantify members of the oligonucleotide library that bind to a sample without requiring a PCR step. This procedure relies on hybridization of the bound oligonucleotide with oligonucleotide-specific complementary probe. The complementary probe can directly or indirectly carry a tag that can be detected. For example, the oligonucleotide-specific complementary probe may carry a fluorescent tag. A general design is shown in FIG. 10G. In the figure, an individual member of the oligonucleotide library 1001 is bound by complementary probe 1002. Complementary probe 1002 consists of three sections from 5′ to 3′: 1) probe part B 1003; 2) probe complement 1004; and 3) probe part A 1005. The member of the oligonucleotide library 1001 is bound by complementary probe 1002 via base pair hybridization between the variable region of oligonucleotide library 1001 and the probe complement region 1004 of complementary probe 1002. Tag probe 1006 which is fluorescently labeled (indicated by the circles in the figure) and capture probe 1007 hydridize to the probe part A 1005 and probe part B 1003 of complementary probe 1002, respectively. These features allow for the capture of the entire complex (i.e., oligonucleotide library 1001, complementary probe 1002, tag probe 1006, and capture probe 1007) via the capture probe, combined with detection via the label of the tag probe 1006. For these experiments, the complementary probes were designed to work with tag probe and capture probe supplied as part of the nCounter nucleic acid detection system from NanoString Technologies, Inc. (Seattle, Wash.). The complementary probes for nCounter quantification were designed as reverse complement to the top 50 oligonucleotide probe binders and 50 negative controls, described above.

### Example 19: Use of an Oligonucleotide Probe Library to Characterize Breast Cancer Samples

[1114] An oligonucleotide probe library comprising approximately 2000 different probe sequences was constructed and used to probe approximately 500 individual breast cancer and non-cancer samples. The probe sequences were derived from different screening experiments and are listed herein in SEQ ID NOs 137-969 and 1072-3150. The oligonucleotides listed in these tables were synthesized and pooled together. The samples were plasma samples from 212 breast cancer patients, 177 biospy confirmed non-cancer patients, and 117 normal control patients (self-reported as non-cancer). Experiments details are as provided above. The plasma samples were contacted with the oligonucleotide probe library and microvesicles were isolated using PEG precipitation. Oligonucleotides that were recovered with the microvesicles were isolated. Next Generation Sequencing (Illumina HiSeq) was used to identify the isolated sequences for each sample.

[1115] Analysis of significance of difference identified 18 aptamers with p-values below 0.01 when compared Cancer/Normal, 15 aptamers with p-values below 0.001 when compared cancer/Non-Cancer, 28 aptamers with p-values below 0.001 when compared Non-Cancer/Normal. Multi-oligonucleotide panels were next constructed using a cross-validation approach.

[1116] Briefly, 50 samples were randomly withheld from the sample cohort. The performance of individual oligonucleotides to distinguish the remaining cancers and non-cancer/normals was determined using logistic regression methodology. Additional oligonucleotides were added iteratively and performance was assessed using logistic regression until further performance improvements were no longer obtained with additional oligonucleotides. The approach generally led to panels of approximately 20-100 different probe sequences. The constructed panels were then used to classify the 50 withheld samples and diagnostic performance was assessed using Receiver Operating Curve (ROC) analysis and estimation of the Area Under the Curve (AUC).

[1117] In approximately 300 rounds of cross-validation, the average AUC was 0.6, thus showing that the average performance was statistically better than random (i.e., AUC of 0.5) and that the probe library could distinguish breast cancer and non-breast cancer/normal patient samples. AUC values as high as 0.8 were observed for particular cross validations. FIGS. 11A-B illustrate a model generated using a training (FIG. 11A) and test (FIG. 11B) set from a round of cross validation. The AUC was 0.803. The variable regions of the sequences used to build this model are shown in Table 19. Another exemplary round of cross-validation is shown in FIGS. 11C-D. The AUC was 0.678.

[1118] The SEQ ID NOs. of the sequences used in the model in FIGS. 11A-B are listed in rank in Table 19. As in Table 18, the oligonucleotides were synthesized with a 5′ region consisting of the sequence (5′-CTAGCATGACTGCAGTACGT (SEQ ID NO. 131)) and a 3′ region consisting of the sequence (5′-CTGTCTCTTATACACATCTGACGCTGCCGACGA (SEQ ID NO. 132)) flanking the variable regions.

TABLE 19
Oligonucleotide Probe Variable Regions
Rank Ordered SEQ ID NOs

215, 1286, 961, 1837, 780, 1319, 3032, 626, 2816, 1311, 364, 3102, 3115, 886, 414, 517, 599, 246, 416,
223, 507, 586, 1455, 1560, 1241, 2771, 1513, 2994, 2757, 461, 1917, 1178, 299, 1409, 959, 785, 322,
636, 1244, 665, 592, 823, 168, 1183, 3000, 182, 534, 1580, 2753, 2989, 1957, 2829, 1960, 856, 3149,
283, 1551, 1974, 605, 363, 266, 3140, 2242, 1306, 652, 634, 2763, 1270, 1728, 893, 1266, 1372, 1141,
1731, 1197, 1649

[1119] The data presented in this Example demonstrate that an oligonucleotide pool comprising members having the variable regions listed in SEQ ID NOs 137-969 and 1072-3150, e.g., a pool of probes having the variable regions listed in Table 19, can be used to distinguish plasma from individuals having breast cancer versus plasma from non-breast cancer individuals.

### Example 20: Updated Oligonucleotide Pools to Characterize Breast Cancer Samples

[1120] The profiling of 500 clinical samples with an oligonucleotide probe library comprising 2000 oligonucleotides showed significant ability to distinguish breast cancer from non-cancer control samples. See Example 19 above. When performing cross-validation in these experiments, it was observed that 85 out of 500 were misclassified at a higher rate compared to the other samples. We therefore identified another selection of oligonucleotide probe which were able to correctly classify the noted samples. These 85 samples were profiled with a naïve oligonucleotide probe library (6-3S/8-3S), and enriched on breast cancer and non-cancer plasma using methodology presented in the Examples above. The selected oligonucleotides were compared to a positive controls cohort, which comprised of the cancer and non-cancer samples that were consistently classified correctly within the experiments in Example 19 above. Oligonucleotides were selected based on absolute number of copies sequenced of at least 50 and various criteria when comparing sample groups including: 1) copy number fold-change (fc) of at least 1.2; 2) effect size (es) above 0.6; 3) t-test (p-value <=0.05); and 4) Kolmogorov-Smirnov test (ks) (p-value <=0.05). Effect size is a population effect size calculated as (mean(group1)−mean(group2))/standard deviation(group 1 and group2).

[1121] The profiling data were normalized by dividing the count of each particular oligonucleotide by the total counts for particular sample and multiplying by the global mean across the entire experiment. These normalized values were used to calculate the statistical criteria specified above to compare the following samples type: Misclassified Cancer (“C”), misclassified non-cancer (“NC”), positive control Cancer (“C-P”), positive control Non-Cancer (“NC-P”), misclassified Normal (“N”). The comparisons performed and numbers of resulting oligonucleotides are shown in Table 20. Negative controls are oligonucleotides that did not match any criteria and thus should not distinguish be any samples groups.

TABLE 20
Oligonucleotide probe candidates were
selected from the following comparisons

| Specificity | Total |
|---|---|
| C/NC-P* A** and C/NC-P B*** | 82 |
| C/NC-P A | 108 |
| C/NC-P B | 13 |
| Negative control | 60 |
| C-P/NC A C-P/NC B | 34 |
| C-P/NC A | 68 |
| C-P/NC B | 101 |
| NC/C-P A NC/C-P B | 7 |
| NC/C-P A | 196 |
| NC-P/C A NC-P/C B | 65 |
| NC-P/C A | 83 |
| NC-P/C B | 55 |
| C + C-P/N | 103 |
| N/C + C-P | 25 |
| Total | 1000 |

*“C/NC-P” in Table 20 means that oligonucleotides were selected with specificity toward cancer (“C”) while compared to Non-Cancer positive (“NC-P”) control.
A** - selection criteria: counts > 50, fc ≥ 1.2, es > 0.6, ttest p < 0.05,
B*** - selection criteria: counts > 200, estimated sample size < 71, fc > 1.2, ttest/ks test p < 0.05.

[1122] The sequences selected based on Table 20 are shown in Table 21. As in Table 18, the oligonucleotides each have a 5′ region consisting of the sequence (5′-CTAGCATGACTGCAGTACGT (SEQ ID NO. 131)) and a 3′ region consisting of the sequence (5′-CTGTCTCTTATACACATCTGACGCTGCCGACGA (SEQ ID NO. 132)). Table 12 lists in rank order the SEQ ID NOs of the variable regions that are positioned between the 5′ and 3′ regions. The column “Specificity” shows the specificity of the oligonucleotides based on the comparisons in Table 20.

TABLE 21
Oligonucleotide Probe Variable Regions

| Specificity | SEQ ID NO. |
|---|---|
| C/NC-P A and C/NC-P B | 3151-3232 |
| C/NC-P A | 3233-3340 |
| C/NC-P B | 3341-3353 |
| Negative control | 3354-3368 |
| C-P/NC A C-P/NC B | 3369-3402 |
| C-P/NC A | 3403-3470 |
| C-P/NC B | 3471-3571 |
| Negative control | 3572-3586 |
| NC/C-P A NC/C-P B | 3587-3593 |
| NC/C-P A | 3594-3789 |
| Negative control | 3790-3804 |
| NC-P/C A NC-P/C B | 3805-3869 |
| NC-P/C A | 3870-3952 |
| NC-P/C B | 3953-4007 |
| Negative control | 4008-4022 |
| C/N | 4023-4125 |
| N/C | 4126-4150 |

[1123] The 1000 selected oligonucleotides are synthesized as DNA with a 5′ biotinylation. The synthesized oligonucleotides are pooled with 1000 of the most informative aptamers from the profiling performed in Example 19 to create a further optimized oligonucleotide probing library that can be used to distinguish cancer and normal samples.

### Example 21: Comparison of Oligonucleotide Pools

[1124] In this Example, the performance of the oligonucleotide pool from Example 19 was compared to the performance of the oligonucleotide pool from Example 20 to characterize breast cancer samples. In this Example, the oligonucleotide pool from Example 19 is referred to as the 2000v1 and the oligonucleotide pool from Example 20 is referred to as the 2000v2. A random forest approach was used to analyze the data, which data was obtained for the 2000v1 library in Example 19. The 2000v2 data was obtained via tested on a cohort of 858 plasma samples which comprised some samples described in Example 19 with additional samples according to three groupings: 194 breast cancer positive, 382 breast cancer negative as confirmed by biopsy (“non-cancer”), and 282 self declared normals (“normal”).

[1125] ROC curves are shown in FIGS. 15A-D for the various settings. AUC values are shown above the curve and are statistically significant from random (i.e., AUC=0.5) in all cases. In FIG. 15A, the 2000v1 probe library was used to distinguish cancer samples versus biopsy confirmed non-cancer samples. In FIG. 15B, the 2000v2 probe library was used to distinguish the same sample groupings. A small improvement in AUC was observed with the 2000v2 probe library in this setting. In FIG. 15C, the 2000v1 probe library was used to distinguish cancer samples versus self-declared normal samples. In FIG. 15D, the 2000v2 probe library was used to distinguish the same sample groupings. A small decline in AUC was observed with the 2000v2 probe library in this setting. Highly stringent

[1126] The SEQ ID NOs. of the variable regions of informative oligonucleotides from the 2000v1 and 2000v2 libraries are listed in Table 22. As above, the oligonucleotides were synthesized with a 5′ region consisting of the sequence (5′-CTAGCATGACTGCAGTACGT (SEQ ID NO. 131)) and a 3′ region consisting of the sequence (5′-CTGTCTCTTATACACATCTGACGCTGCCGACGA (SEQ ID NO. 132)) flanking the variable regions. The listed oligonucleotides were used in the Random Forest modeling to generate AUC values, e.g., as shown in FIGS. 15A-D, and are listed in rank order. The row “Common” in Table 22 shows overlapping informative sequences from the 2000v1 and 2000v2 settings.

TABLE 22
Informative oligonucleotide probes

| Setting | SEQ ID NO. |
|---|---|
| 2000v1 | 1102, 624, 3032, 597, 2831, 1923, 706, 752, 1188, 238, 605, 2809, 651, 611, 2830, 1163, |
| | 1187, 1106, 421, 843, 1186, 1100, 1235, 3140, 173, 1243, 289, 178, 3035, 1080, 890, 1225, |
| | 1995, 508, 183, 435, 2584, 2795, 1814, 1924, 3075, 939, 1183, 431, 938, 1731, 1095, 446, |
| | 623, 1732, 3024, 216, 626, 672, 457, 830, 1497, 777, 610, 3038, 1460, 665, 1079, 148, 1445, |
| | 885, 1697, 1197, 1769, 965, 164, 838, 606, 3018, 493, 1830, 859, 2047, 1837, 404, 1693, |
| | 1201, 899, 264, 841, 1678, 1949, 628, 354, 1523, 3036, 495, 727, 1997, 676, 546, 1507, 615, |
| | 616, 3096, 1435, 1194, 1195, 698, 660, 1994, 1123, 290, 934, 428, 715, 751, 3064, 602, 345, |
| | 662, 1820, 586, 241, 929, 1136, 316, 803, 3095, 936, 1381, 537, 254, 1119, 1652, 1955, |
| | 1534, 2965, 496, 405, 757, 612, 145, 1248, 599, 942, 505, 907, 1353, 2786, 1509, 211, 1170, |
| | 736, 486, 815, 540, 1540, 1250, 3000, 2971, 348, 3108, 445, 1548, 1723, 888, 1284, 604, |
| | 858, 1372, 1083, 584, 767, 3135, 855, 2730, 805, 1557, 565, 1600, 920, 2330, 1977, 710, |
| | 1220, 1907, 441, 795, 1939, 1386, 908, 2986, 350, 552, 2953, 3134, 250, 765, 827, 1216, |
| | 526, 969, 1903, 693, 650, 1359, 789, 747, 826, 2002, 1291, 639, 1244, 573, 3119, 523, 594, |
| | 854, 898, 429, 1881, 569, 1538, 848, 738, 911, 669, 909, 329, 577, 2964, 272, 648, 1481, |
| | 1719, 816, 2981, 533, 2748, 1660, 3050, 755, 1706, 1504, 3059, 1276, 1547, 2732, 922, |
| | 2977, 2952, 1522, 1273, 1399, 1556, 2998, 853, 1256, 845, 625, 2005, 2987, 2985, 1327, |
| | 807, 923, 1500, 1331, 2497, 641, 1282, 1940, 629, 2970, 1150, 1915, 1862, 389, 1304, 2979, |
| | 3061, 1328, 2740, 819, 353, 396, 2983, 1164, 3029, 1566, 2041, 2972, 966 |
| 2000v2 | 4116, 171, 3280, 3401, 3879, 1175, 3291, 651, 3343, 592, 3110, 3682, 605, 3231, 3556, 389, |
| | 624, 399, 3173, 3483, 795, 3918, 211, 309, 3595, 4101, 3780, 1169, 803, 1392, 3332, 415, |
| | 3652, 1610, 3262, 163, 1477, 4044, 3319, 722, 3607, 3414, 564, 511, 826, 431, 4052, 3329, |
| | 692, 3153, 295, 1548, 635, 3900, 370, 3698, 342, 3545, 614, 178, 3699, 467, 3307, 770, |
| | 4055, 3912, 164, 3232, 4048, 2762, 3856, 2587, 421, 3683, 3000, 633, 3712, 3466, 3769, |
| | 3537, 4058, 4018, 2808, 4026, 3785, 4083, 3151, 1288, 4050, 3560, 3786, 1121, 3742, 3128, |
| | 4132, 1171, 3619, 3471, 566, 3751, 4110, 4091, 787, 1176, 3735, 538, 240, 3064, 2754, |
| | 3035, 199, 3777, 831, 1247, 1188, 3667, 3086, 3741, 3650, 1272, 3402, 3317, 3618, 1466, |
| | 1590, 3489, 3659, 1091, 3601, 4023, 1469, 1777, 2008, 4059, 1593, 4062, 205, 2838, 3087, |
| | 2835, 3661, 1661, 3551, 3612, 1322, 3629, 3789, 2017, 1325 |
| Common | 1188, 3064, 421, 624, 389, 803, 431, 826, 3035, 164, 178, 651, 3000, 1548, 211, 605, 795 |

[1127] The data presented in this Example demonstrate that an oligonucleotide pool comprising members having the variable regions listed in SEQ ID NOs 137-969 and 1072-4150, e.g., a pool of probes having the variable regions listed in Table 22, can be used to distinguish plasma from individuals having breast cancer versus plasma from non-breast cancer individuals.

### Example 22: Anti-C1q Oligonucleotides

[1128] This Example presents identification of anti-C1q aptamers. In this Example, biotinylated forms of oligonucleotides that differentiate cancer and non-cancer plasma samples were synthesized and immobilized to streptavidin beads and incubated with the PEG precipitated plasma fraction. Proteins that immunoprecipitated with oligonucleotides from SEQ ID NO. 1472-1486 were separated by SDS-PAGE. Specific bands were excised from the gel and proteins therein identified by in-gel trypsin digestions and LC-MS/MS such as in Example 15 above.

[1129] Immunoprecipitation of specific oligonucleotides conjugated to magnetic beads was performed to identify oligonucleotide targets. Several oligonucleotides were identified that recognized C1q and subunits. The sequences of the variable regions of identified anti-C1q aptamers include 5′-ACTATAGAACAATCCACCGCTTTAAATCAACTATCTTA (SEQ ID NO. 1472), also known by the identifier 83S-B1; 5′-TACCCCTGACAATCCTCGCGCCGAGGCCTCCATCCTGA (SEQ ID NO. 1475), also known by the identifier 83S-B4; 5′-GATTTTAAAACCCTTGCACCTGATTGTGCCAATCCA (SEQ ID NO. 1477), also known by the identifier 83S-B6; and 5′-AACCCAATTCACATACACTCTCACCCCCACTAAACA (SEQ ID NO. 1482), also known by the identifier 83S-B11. Of note, the variable regions of 83S-B1 and 83S-B4 share the motif 5′-ACAATCC (SEQ ID NO. 4151), suggesting that this may comprise a consensus sequence that facilitates binding to C1q. Further as noted below, an oligonucleotide comprising the reverse complement of this putative consensus sequence did not bind C1q. Several variants of the anti-C1q aptamers were also identified in our previous experiments described in Example 27 of PCT/US2016/044595, filed Jul. 28, 2016. The sequences of the variable regions thereof are shown in Table 23. As above, the full length oligonucleotide probes in Table 23 each had a 5′ region consisting of the sequence (5′-CTAGCATGACTGCAGTACGT (SEQ ID NO. 131)) and a 3′ region consisting of the sequence (5′-CTGTCTCTTATACACATCTGACGCTGCCGACGA (SEQ ID NO. 132)). Table 23 shows the variable region that is positioned between the 5′ and 3′ regions of the sequences.

TABLE 23
Anti-C1q Variable Regions

| | |
|---|---|
| | SEQ |
| | ID |
| Variable Region | NO. |

83S-B1 (SEQ ID NO. 1472) and variants below

| | |
|---|---|
| ACTATAGAACAATCCACCGCTTTAAATCAACTATCTTA | 1472 |
| Variants of SEQ ID NO. 1472 | 4152- |
| | 4164 |

83S-B4 (SEQ ID NO. 1475) and variants below

| | |
|---|---|
| TACCCCTGACAATCCTCGCGCCGAGGCCTCCATCCTGA | 1475 |
| Variants of SEQ ID NO. 1475 | 1485, |
| | 4165, |
| | 4166 |

83S-B6 (SEQ ID NO. 1477) and variants below

| | |
|---|---|
| GATTTTAAAACCCTTGCACCTGATTGTGCCAATCCA | 1477 |
| Variants of SEQ ID NO. 1477 | 4167- |
| | 49 |

83S-B11 (SEQ ID NO. 1482) and variants below

| | |
|---|---|
| AACCCAATTCACATACACTCTCACCCCCACTAAACA | 1482 |
| Variants of SEQ ID NO. 1482 | 4170- |
| | 4325 |

[1130] Specificity for C1q as a target was performed by immunoprecipitation of C1q depleted or spiked serum and plasma samples. SDS-PAGE analysis of the immunoprecipitation products demonstrated that bands corresponding to C1q subunits (i.e., A, B, C) were only present in the samples spiked with C1q. As a control, oligonucleotides comprising the reverse complements to SEQ ID NOs. 1472 and 1482 were synthesized. For example, the construct comprising the reverse complement to SEQ ID NOs. 1472 comprised the variable region sequence 5′-TTAAGATAGTTGATTTAAAGCGGTGGATTGTTCTATAGT (SEQ ID NO. 4326).

[1131] FIG. 17A shows a silver-stained reducing sodium dodecyl sulfate-polyacrylamide (SDS-PA) gel of immunoprecipitated proteins from plasma samples with the indicated oligonucleotides. In the figure, B1 comprises the variable region SEQ ID NO. 1472, B11 comprises the variable region SEQ ID NO. 1482, and L4 and L15 comprises variable regions without specific recognition of C1q. The individual biotinylated oligonucleotides were immobilized on streptavidin magnetic beads, contacted with PEG-precipitated plasma isolates from a pool of healthy donors, and the beads were isolated. Proteins that immunoprecipitated with the beads are shown on the gel. Controls included the reverse complements of B1 and B11 (lanes B1rc and B11rc, respectively) and a control using beads without oligonucleotides (Lane “NO”). Dashed arrows indicate pulled down proteins C1qA, C1qB, and C1qC. The dotted arrow indicates the heavy chain of IgM (IgMHC). The band labeled “SA” is streptavidin and the lane kDa is a protein ladder. As shown in FIG. 17A, specific bands indicated by the dashed arrows were observed in the B1 and B11 immunoprecipitation experiments. These bands were excised and analyzed by LC-MS/MS. This analysis revealed the complement protein complex C1q as the target of sequences B1 and B11, and the figure indicates the positions of C1q subunits A, B and C. In contrast, reverse complement versions of B1 and B11 (i.e., B1rc, B11rc) did not immunoprecipitate C1q. Also shown in the figure, IgM co-precipitated with C1q. Without being bound by theory, these findings are consistent with previous observations where IgM was found to remain complexed with C1q in sera that were precipitated with PEG. See Krieger, et al. Characterization of immune complexes detected by the 125I-C1q binding assay in breast cancer. Clin Immunol Immunopathol 46, 14-23 (1988); which publication is incorporated by reference herein in its entirety.

[1132] To further investigate the interaction of aptamer B1 and B11 with C1q, we performed a filter retention assay. Radioactively labelled B1 and B11 were incubated with increasing concentrations of purified C1q and subsequently passed through a nitrocellulose membrane. The amount of oligonucleotides retained on membrane-immobilized C1q was then quantified by autoradiography. Results are shown in FIG. 17B. These experiments demonstrate that B1 and B11 exhibit concentration dependent binding to C1q, whereas B11rc did not. Similar results were obtained with B11 and B11rc in an Enzyme-Linked Oligonucleotide Assay (ELONA; see U.S. Pat. No. 5,789,163, which patent is incorporated herein in its entirety). See FIG. 17C. The figure shows ELONA analysis of B11 (circles) at indicated concentrations and a fixed C1q concentration (0.625 nM). As a control, the reverse complement of B11, B11RC, was used (squares). “No aptamer” control (triangles) shows low background binding of detector Streptavidin-HRP. B11 specifically binds C1q (estimated K_{D} around 40 nM). This binding behaviour indicates that B1 and B11 specifically interact with C1q with high affinity.

[1133] A second control comprised the reverse complement to the consensus motif (i. e., SEQ ID NO. 4151). This construct comprised the variable region sequence 5′-TACTATAGATGGATTGTCCGCTTTAAATCAACTATCTTA (SEQ ID NO. 4327) and did not immunoprecipitate C1q from plasma.

[1134] Table 24 lists proteins that were identified in the immunoprecipitation with B1 (i.e., SEQ ID NO. 1472) using PSMs (peptide spectrum matches) sorted by area. The proteins in the list were observed only in the immunoprecipitation with B1 (i.e., not observed with negative controls) or at levels at least 2-fold over negative controls. The mass spectrometry results were obtained from a single band that was run a short distance in a gel in order to clean up the sample. Accession numbers in the table are from the UniProt database (www.uniprot.org). “GN=” is followed by the gene name. As seen in Table 24, C1q subunits A-C were prominent in the results. IgM was also observed at high levels. Without being bound by theory, this may be due to complexes between C1q and immunoglobulins as noted above. Complement C4b-binding protein alpha chain was also observed at 10-fold higher levels versus controls.

TABLE 24
Oligonucleotide probe targets

| Accession | |
|---|---|
| number | Protein name |
| P02747 | Complement C1q subcomponent subunit C GN = C1QC |
| P02746 | Complement C1q subcomponent subunit B GN = C1QB |
| P01871 | Ig mu chain C region GN = IGHM |
| P04220 | Ig mu heavy chain disease protein |
| P02745 | Complement C1q subcomponent subunit A GN = C1QA |
| P01834 | Ig kappa chain C region GN = IGKC |
| P0CG05 | Ig lambda-2 chain C regions GN = IGLC2 |
| B9A064 | Immunoglobulin lambda-like polypeptide 5 GN = IGLL5 |
| P01857 | Ig gamma-1 chain C region GN = IGHG1 |
| P01860 | Ig gamma-3 chain C region GN = IGHG3 |
| P01859 | Ig gamma-2 chain C region GN = IGHG2 |
| P01766 | Ig heavy chain V-III region BRO |
| O43866 | CD5 antigen-like GN = CD5L |
| P01877 | Ig alpha-2 chain C region GN = IGHA2 |
| P01617 | Ig kappa chain V-II region TEW |
| P01767 | Ig heavy chain V-III region BUT |
| P06310 | Ig kappa chain V-II region RPMI 6410 |
| P01768 | Ig heavy chain V-III region CAM |
| P01779 | Ig heavy chain V-III region TUR |
| P01620 | Ig kappa chain V-III region SIE |
| P01606 | Ig kappa chain V-I region OU |
| P04208 | Ig lambda chain V-I region WAH |
| P18135 | Ig kappa chain V-III region HAH |
| P01825 | Ig heavy chain V-II region NEWM |
| P01591 | Immunoglobulin J chain GN = IGJ |
| P01598 | Ig kappa chain V-I region EU |
| P01605 | Ig kappa chain V-I region Lay |
| P04433 | Ig kappa chain V-III region VG (Fragment) |
| P01610 | Ig kappa chain V-I region WEA |
| Q8WZ74 | Cortactin-binding protein 2 GN = CTTNBP2 |
| P01781 | Ig heavy chain V-III region GAL |
| P04003 | C4b-binding protein alpha chain GN = C4BPA |
| P00739 | Haptoglobin-related protein GN = HPR |
| P06312 | Ig kappa chain V-IV region (Fragment) GN = IGKV4-1 |
| P00738-2 | Isoform 2 of Haptoglobin GN = HP |
| P01625 | Ig kappa chain V-IV region Len |
| P01717 | Ig lambda chain V-IV region Hil |
| Q04695 | Keratin, type I cytoskeletal 17 GN = KRT17 |
| Q96PE2 | Rho guanine nucleotide exchange factor 17 GN = ARHGEF17 |
| P04211 | Ig lambda chain V region 4A |
| P05090 | Apolipoprotein D GN = APOD |
| P34096 | Ribonuclease 4 GN = RNASE4 |
| P01714 | Ig lambda chain V-III region SH |
| O14490-3 | Isoform 3 of Disks large-associated protein 1 GN = DLGAP1 |
| P04196 | Histidine-rich glycoprotein GN = HRG |
| P35030-5 | Isoform 5 of Trypsin-3 GN = PRSS3 |
| P04430 | Ig kappa chain V-I region BAN |
| P00748 | Coagulation factor XII GN = F12 |
| P06727 | Apolipoprotein A-IV GN = APOA4 |
| P02655 | Apolipoprotein C-II GN = APOC2 |
| P01611 | Ig kappa chain V-I region Wes |
| Q569G3 | Uncharacterized protein C5orf47 GN = C5orf47 |
| Q9Y490 | Talin-1 GN = TLN1 |
| Q5D862 | Filaggrin-2 GN = FLG2 |
| P01876 | Ig alpha-1 chain C region GN = IGHA1 |
| P01703 | Ig lambda chain V-I region NEWM |
| P02768 | Serum albumin GN = ALB |
| P10909-3 | Isoform 3 of Clusterin GN = CLU |
| P60709 | Actin, cytoplasmic 1 GN = ACTB |
| P04114 | Apolipoprotein B-100 GN = APOB |
| P0C0L4-2 | Isoform 2 of Complement C4-A GN = C4A |
| P0C0L5 | Complement C4-B GN = C4B |
| Q9H4B7 | Tubulin beta-1 chain GN = TUBB1 |
| P02675 | Fibrinogen beta chain GN = FGB |
| P01024 | Complement C3 GN = C3 |
| P35579 | Myosin-9 GN = MYH9 |
| P21333-2 | Isoform 2 of Filamin-A GN = FLNA |
| P02679-2 | Isoform Gamma-A of Fibrinogen gamma chain GN = FGG |
| P00698 | Lysozyme C OS = Gallus gallus GN = LYZ |
| P02671 | Fibrinogen alpha chain GN = FGA |
| P02647 | Apolipoprotein A-I GN = APOA1 |
| P68363-2 | Isoform 2 of Tubulin alpha-1B chain GN = TUBA1B |
| Q14624 | Inter-alpha-trypsin inhibitor heavy chain H4 GN = ITIH4 |
| P00747 | Plasminogen GN = PLG |
| P02649 | Apolipoprotein E GN = APOE |
| Q9Y2P0 | Zinc finger protein 835 GN = ZNF835 |
| Q96IY4 | Carboxypeptidase B2 GN = CPB2 |
| P08519 | Apolipoprotein(a) GN = LPA |
| P04264 | Keratin, type II cytoskeletal 1 GN = KRT1 |
| P35908 | Keratin, type II cytoskeletal 2 epidermal GN = KRT2 |
| P02751-10 | Isoform 10 of Fibronectin GN = FN1 |
| P01023 | Alpha-2-macroglobulin GN = A2M |
| P01009-2 | Isoform 2 of Alpha-1-antitrypsin GN = SERPINA1 |
| P05160 | Coagulation factor XIII B chain GN = F13B |
| P04004 | Vitronectin GN = VTN |
| Q86YZ3 | Homerin GN = HRNR |
| P13645 | Keratin, type I cytoskeletal 10 GN = KRT10 |
| P13647 | Keratin, type II cytoskeletal 5 GN = KRT5 |
| Q03591 | Complement factor H-related protein 1 GN = CFHR1 |
| P08603 | Complement factor H GN = CFH |
| P35527 | Keratin, type I cytoskeletal 9 GN = KRT9 |
| P00488 | Coagulation factor XIII A chain GN = F13A1 |

[1135] The oligonucleotide sequences in Table 23 can be further modified to assess the effects of various subsequences and structural conformation on the ability to bind C1q. Exemplary rationally designed modifications are shown in Table 25. For example, the modifications can be based on the secondary structure of the oligonucleotides as estimated using mFold. The sequences in the table may comprise a modification such as a 5′ Biotin motif. The Name column indicates the sequence and/or modifications thereof. For example, “83s B1 Full” (SEQ ID NO. 4328) consists of the 83s B1 sequence (SEQ ID NO. 1472) shown above with 5′ and 3′ regions (i.e., SEQ ID NOs. 131 and 132, respectively). Beneath are truncations (“TrXX-YY,” where XX is the start position of the truncation and YY is the end position of the truncation as compared to the parent), substitutions (e.g., T(23)G indicating that T at position 23 of the parent sequence is modified to G), and combinations thereof. “RC” indicates reverse complement sequence, in this case for use as a negative control. The italicized and underlined sequences highlight the 5′-ACAATCC consensus sequence.

TABLE 25
Modified anti-C1q oligonucleotide probe
targets

| | | SEQ |
|---|---|---|
| | | ID |
| Name | Sequence | NO. |
| 83s B1 | CTAGCATGACTGCAGTACGTACTATAGA | 4328 |
| Full | ACAATCCACCGCTTTAAATCAACTATCT | |
| | TACTGTCTCTTATACACATCTGACGCTG | |
| | CCGACGA | |
| 83s | ACGTACTATAGAACAATCCACCGCTTTA | 4329 |
| B1_ | AATCAACTATCTTACTGT | |
| Tr17-62 | | |
| 83s | GTACTATAGAACAATCCACCGCTTTAAA | 4330 |
| B1_ | TCAACTATCTTAC | |
| Tr19-59 | | |
| 83s | CTAGCATGACTGCAGTACGTACGATAGA | 4331 |
| B1_ | ACAATCCACCGCTTTAAATCAACTATCT | |
| T(23)G | TACTGTCTCTTATACACATCTGACGCTG | |
| | CCGACGA | |
| 83s | ACGTACGATAGAACAATCCACCGCTTTA | 4332 |
| B1_Tr17- | AATCAACTATCTTACTGT | |
| 62T(23)G | | |
| 83s | CTAGCATGACTGCAGTACGTACTATAGA | 4333 |
| B1_ | ACAATCCACCGCTTTAAATCAACTATCT | |
| T(57)G | GACTGTCTCTTATACACATCTGACGCTG | |
| | CCGACGA | |
| 83s | ATAGAACAATCCACCGCTTTAAATCAAC | 4334 |
| B1_ | TATCTGACTGTCTCTTATACACATC | |
| T(57)G_ | | |
| Tr24-76 | | |
| 83S-B11 | CTAGCATGACTGCAGTACGTAACCCAAT | 4335 |
| Full | TCACATACACTCTCACCCCCACTAAACA | |
| | CTGTCTCTTATACACATCTGACGCTGCC | |
| | GACGA | |
| B11_ | CTAGCATGACTGCAGTACGTAACC | 4336 |
| C(47)T | CAAT [symbol] CACATACACTCTCACCCTCA | |
| | CTAAACACTGTCTCTTATACACATCTGA | |
| | CGCTGCCGACGA | |
| B11_ | GTAACCCAATTCACATAC | 4337 |
| Tr19-35 | | |
| B11 | GGTAACCCAATTCACATACC | 4338 |
| Tr_ | | |
| G18_19- | | |
| 35_36C | | |
| 83s B1RC | CTAGCATGACTGCAGTACGTTAAGATAG | 4339 |
| (Negative | TTGATTTAAAGCGGTGGATTGTTCTATA | |
| Control) | GTCTGTCTCTTATACACATCTGACGCTG | |
| | CCGACGA | |
| 83S-B4 | CTAGCATGACTGCAGTACGTTACCCCTG | 4340 |
| Full | ACAATCCTCGCGCCGAGGCCTCCATCCT | |
| | GACTGTCTCTTATACACATCTGACGCTG | |
| | CCGACGA | |
| 83s-B14 | CTAGCATGACTGCAGTACGTTACCCCTG | 4341 |
| Full | ACAATCCTCGCGCCGAGGCCTCCATCCT | |
| | CACTGTCTCTTATACACATCTGACGCTG | |
| | CCGACGA | |
| 83s-B6 | CTAGCATGACTGCAGTACGTGATTTTAA | 4342 |
| Full | AACCCTTGCACCTGATTGTGCCAATCCA | |
| | CTGTCTCTTATACACATCTGACGCTGCC | |
| | GACGA | |

[1136] In further analysis, C1q was immunoprecipitated from female plasma samples using the 83s B1 aptamer (or its negative control). For sequences, see Table 25 above. C1q was eluted with TFA/Urea+/−acetonitrile then detected by either an in-solution trypsin digestion followed by mass spectrometry or SDS-PAGE stained for total protein as in FIG. 17A (gel not shown). Mass Spectrometry was performed using the Q Exactive HF Mass Spectrometer system from ThermoFisher Scientific (Waltham, Mass.) according to the manufacturer's instructions. Various post-translational modifications (PTM) have been observed for C1q A. For example, the UniProt database lists various oxidation sites (e.g., P45, K48, P54, P57, P73, P79, P85) and galactosyl sites (e.g., K48, K67). Other modifications were reported in Pflieger et al., Analysis of Human C1q by Combined Bottom-up and Top-down Mass Spectrometry, Mol Cell Proteomics. 2010 April; 9(4): 593-610, which publication is incorporated by reference herein in its entirety. Table 26 lists PTMs observed in this study. The modifications in bold italics are previously unreported to our knowledge.

TABLE 26
Observed C1q A post-translational modifications

| | | | | | SEQ |
|---|---|---|---|---|---|
| Posi- | Tar- | Modifi- | Classifica- | Sequence | ID |
| tion | get | cation | tion | Motif | NO. |
| 45 | P | Oxidation | Post- | PGRRGRpGLKGEQ | 4343 |
| | | | translational | | |
| 48 | K | Galactosyl | O-linked | RGRPGLkGEQGEP | 4344 |
| | | | glycosylation | | |
| 48 | K | Oxidation | Post- | RGRPGLkGEQGEP | 4345 |
| | | | translational | | |
| 54 | P | Oxidation | Post- | KGEQGEpGAPGIR | 4346 |
| | | | translational | | |
| 57 | P | Oxidation | Post- | QGEPGApGIRTGI | 4346 |
| | | | translational | | |
| 67 | K | Galactosyl | O-linked | TGIQGLkGDQGEP | 4347 |
| | | | glycosylation | | |
| 73 | P | Oxidation | Post- | KGDQGEpGPSGNP | 4348 |
| | | | translational | | |
| 75 | P | Oxidation | Post- | DQGEPGpSGNPGK | 4349 |
| | | | translational | | |
| 79 | P | Oxidation | Post- | PGPSGNpGKVGYP | 4350 |
| | | | translational | | |
| 81 | K | Galactosyl | O-linked | [symbol] [symbol] | 4351 |
| | | | glycosylation | | |
| 85 | P | Oxidation | Post- | PGKVGYpGPSGPL | 4352 |
| | | | translational | | |
| 87 | P | Oxidation | Post- | [symbol] [symbol] | 4353 |
| | | | translational | | |
| 106 | P | Oxidation | Post- | [symbol] [symbol] | 4354 |
| | | | translational | | |
| 126 | M | Oxidation | Artefact | IRRNPPmGGNVVI | 4355 |
| 205 | M | Oxidation | Artefact | QVVSGGmVLQLQQ | 4356 |

### Example 23: C1q Immunoassay and Isolation

[1137] This Example illustrates C1q immunoassays using an anti-C1q oligonucleotide. A nucleic acid construct is synthesized comprising an anti-C1q oligonucleotide region, for example, as described in Example 22 above. The anti-C1q construct comprises a 5′ biotin modification to facilitate specific recognition by a desired moiety attached to streptavidin.

[1138] A labeled anti-C1q aptamer construct is constructed. The anti-C1q construct is contacted with fluorescently labeled streptavidin such as a streptavidin-Alexa FluorR 488 conjugate from Thermo Fisher Scientific, Catalog number: S11223. This creates a fluorescently labeled anti-C1q construct which is used to detect C1q in various immunoassay formats. In one scenario, a biological sample known or suspected to contain C1q is contacted with an ELISA plate. The plate is washed and contacted with the fluorescently labeled anti-C1q construct. The fluorescent signal is read from the wells in the plate, thereby providing an indication of the presence or amount of C1q in the biological sample. In another scenario, a biological sample is directly contacted with the fluorescently labeled anti-C1q construct. The contacted sample is subjected to flow cytometry to detect fluorescent particles of the size of microvesicles, thereby providing an indication of the presence or amount of microvesicle associated C1q in the biological sample. Alternate labels such as disclosed herein or known in the art can be used in such formats.

[1139] Various modifications of the above scenarios are performed. For example, the anti-C1q aptamer is directly labeled with Alexa Fluor during the oligonucleotide synthesis process.

[1140] An immobilized anti-C1q aptamer is constructed. In one scenario, the anti-C1q aptamer construct is contacted with streptavidin conjugated beads. The beads are contacted with a biological sample known or suspected to contain C1q. The beads are precipitated (e.g., by centrifugation or magnetism) and washed. Proteins that precipitate with the beads are analyzed, thereby providing an indication of the presence or amount of C1q and associated proteins in the biological sample. In another scenario, the anti-C1q aptamer construct is contacted with streptavidin agarose resin, e.g., Pierce™ Streptavidin Agarose, Thermo Fisher Scientific Catalog number: 20347 or Pierce™ High Capacity Streptavidin Agarose Thermo Fisher Scientific Catalog number: 20357. The resins are placed in a spin column or chromatography column, respectively. The anti-C1q aptamer is contacted with the resin where it is bound by the streptavidin. A biological sample known or suspected to comprise C1q is allowed to pass through the resin. C1q and associated proteins in the biological sample are retained by the anti-C1q aptamer within the resin and are then analyzed after elution. In either scenario, if desired, the anti-C1q aptamer is contacted with the biological sample in solution and then the sample is contacted with the beads or resin. C1q and associated proteins are analyzed as above. This modification allows the C1q and aptamer to bind freely in solution prior to aptamer immobilization.

[1141] Various modifications of the above scenarios are performed. For example, the anti-C1q aptamer is directly conjugated to a bead or other desired surface.

[1142] One of skill will appreciate that the anti-C1q aptamer construct can be used in any desired scenario where antibodies are conventionally used. See, e.g., Toh et al., Aptamers as a replacement for antibodies in enzyme-linked immunosorbent assay. Biosens Bioelectron. 2015 Feb. 15; 64:392-403. doi: 10.1016/j.bios.2014.09.026. Epub 2014 Sep. 16; Chen and Yang, Replacing antibodies with aptamers in lateral flow immunoassay. Biosens Bioelectron. 2015 Sep. 15; 71:230-42. doi: 10.1016/j.bios.2015.04.041. Epub 2015 Apr. 14; Guthrie et al, Assays for cytokines using aptamers. Methods. 2006 April; 38(4):324-30; Romig et al., Aptamer affinity chromatography: combinatorial chemistry applied to protein purification. J Chromatogr B Biomed Sci Appl. 1999 Aug. 20; 731(2):275-84.

### Example 24: C1q Detection in Bodily Fluids

[1143] This Example describes using an anti-C1q oligonucleotide to detect C1q in bodily fluids. A bodily fluid such as blood or a derivative thereof, including without limitation sera or plasma, is obtained from a subject. An assay such as described in Example 23 is used to detect C1q in the bodily fluid. As desired, such detection may assist in the diagnosis, prognosis or theranosis of a disease or disorder. See, e.g., Examples 8-9 herein.

[1144] In one scenario, the anti-C1q aptamer is used to capture and quantitate immune complexes in clinical samples based on the ability of C1q to preferentially bind immune complexes versus monomeric immunoglobulins.

### Example 25: C1q Inhibition

[1145] This Example describes using an anti-C1q oligonucleotide to inhibit C1q mediated apoptosis.

[1146] Deficiency in the host C1q inhibitor protein, encoded by the SERPING1 gene (also known as C1NH and others), is associated with hereditary angioedema (“hereditary angioneurotic edema”; “HAE”), which comprises swelling due to leakage of fluid from blood vessels into connective tissue. In addition to facial swelling and/or abdominal pain, C1q inhibitor deficiency also predisposes to autoimmune diseases, e.g., lupus erythematosus, and age related macular degeneration. C1q inhibitors CINRYZE® (C1 esterase inhibitor [human]) and RUCONEST® (C1 esterase inhibitor [recombinant]) are approved by the US FDA for HAE symptoms. See, e.g., Bernstein, Hereditary angioedema: a current state-of-the-art review, VIII: current status of emerging therapies. Ann. Allergy Asthma Immunol. 100 (1 Suppl 2): S41-6 (January 2008). A pharmaceutical composition comprising an anti-C1q oligonucleotide of the invention is administered to an HAE patient in sufficient dosage to ameliorate symptoms of HAE.

[1147] As the complement cascade damages cells, C1q inhibitors have potential functionality for diseases other than HAE. See e.g., Caliezi et al, C1-Esterase inhibitor: an anti-inflammatory agent and its potential use in the treatment of diseases other than hereditary angioedema. Pharmacol. Rev. 52 (1): 91-112 (March 2000). During heart attack, lack of oxygen in heart cells causes necrosis in heart cells. Dying heart cells spill their contents in the extracellular environment, which triggers the complement cascade and may increase the damage for the surviving heart cells. A pharmaceutical composition comprising an anti-C1q oligonucleotide of the invention is administered to a heart attack victim in sufficient dosage to ameliorate complement-mediated heart damage. Similarly, a pharmaceutical composition comprising an anti-C1q oligonucleotide of the invention is administered to a patient following organ transplantation to ameliorate delayed graft function.

[1148] The complement cascade is a first defense against non-self cells and is also activated by malignant cells. Thus, complement appears to play a role in cancer surveillance by the immune system. Recently, however, it has been reported that the complement system can also play a role in promoting tumor growth, inflammation and angiogenesis. Thus, complement inhibition has been proposed for cancer treatment. See, e.g., Pio et al, Complement inhibition: a promising concept for cancer treatment, Semin Immunol. 2013 February; 25(1): 54-64; Pio et al., The role of complement in tumor growth. Adv Exp Med Biol. 2014; 772:229-62. It has further been reported that C1q may act in the tumor microenvironment to promote cancer independently of its complement function. Bulla et al. report that C1q may promote cancer cell adhesion, migration and proliferation as well as angiogenesis and metastasis. See Bulla et al., C1q acts in the tumour microenvironment as a cancer-promoting factor independently of complement activation. Nat Commun. 2016; 7: 10346. A pharmaceutical composition comprising an anti-C1q oligonucleotide of the invention is administered to a cancer victim in sufficient dosage to treat the cancer in the victim. As desired, the composition is administered in combination with traditional cancer therapeutics or in addition to immune therapies, e.g., cell-based tumor immunotherapies, or antitumor vaccines.

### Example 26: Complement Cascade Initiation

[1149] This Example describes using an anti-C1q oligonucleotide to direct complement mediated cell killing.

[1150] Antibody immunotherapies may direct the killing of target cells through several mechanisms, including without limitation complement-dependent cytotoxicity (CDC), antibody-dependent cellular cytotoxicity (ADCC), apoptosis, and direct growth arrest. See, e.g., Taylor and Lindorfer, The role of complement in mAb-based therapies of cancer. Methods. 2014 Jan. 1; 65(1): 18-27. doi: 10.1016/j.ymeth.2013.07.027. Epub 2013 Jul. 22; Rogers et al., Complement in monoclonal antibody therapy of cancer. Immunol Res. 2014 August; 59(1-3):203-10. doi: 10.1007/s12026-014-8542-z; Zhou et al., The Role of Complement in the Mechanism of Action of Rituximab for B-Cell Lymphoma: Implications for Therapy, The Oncologist September 2008 vol. 13 no. 9 954-966; Di Gaetano et al., Complement activation determines the therapeutic activity of rituximab in vivo. J Immunol. 2003 Aug. 1; 171(3):1581-7.

[1151] The Fc regions of membrane-bound therapeutic antibodies interact with the heterooligomeric C1q complex and activate the classical complement pathway to initiate CDC. A multipartite construct comprising an anti-C1q oligonucleotide of the invention is provided in a pharmaceutical composition. The pharmaceutical composition is administered to a cancer victim in sufficient dosage to treat the cancer in the victim. The construct comprises the anti-C1q oligonucleotide connected to an anti-tumor domain. See, e.g., FIGS. 16A-D herein and related discussion. The anti-tumor domain can be to a general tumor antigen or specific to a tumor of a given origin. See, e.g., Section “Anti-target and multivalent oligonucleotides” herein for illustrative targets. The anti-tumor domain may comprise the C10.36 aptamer provided herein (SEQ ID NO. 4357). As desired, the multipartite construct comprising an anti-C1q oligonucleotide is used to direct complement mediated cell killing where cancer cells and tumors have adapted to evade the complement system.

[1152] As noted herein, C1q may play a role in both preventing cancer, e.g., through complement mediated cell killing, and facilitating the growth of cancer, e.g., through cancer cell adhesion, migration and proliferation as well as angiogenesis and metastasis, perhaps in a non-complement fashion. Such disparate roles allow for combination treatment with oligonucleotides of the invention that both inhibit the roles of C1q in promoting cancer while targeting C1q mediated cell killing to cancer cells. A multipartite construct comprising an anti-C1q oligonucleotide of the invention is provided in a pharmaceutical composition. An anti-C1q oligonucleotide of the invention that inhibits non-complement functions of C1q is provided in a pharmaceutical composition. The pharmaceutical compositions are administered to a cancer victim in sufficient dosage to treat the cancer in the victim.

### Example 27: Anti-Lymphoma Oligonucleotide Probes

[1153] This Example presents aptamer sequences that can be used to target cancer cells. For example, the aptamer can be used to target the C1q aptamers of the invention (see, e.g., Table 23) to cancer cells. This Example uses the C10 aptamer from Raddatz et al., Enrichment of cell-targeting and population-specific aptamers by fluorescence-activated cell sorting. Angew Chem Int Ed Engl. 2008; 47(28):5190-3; which publication is incorporated by reference herein in its entirety. The C10 aptamer was found to recognize Burkitt Lymphoma cells. Here we have discovered a 36-mer sequence of Aptamer C10, the “C10.36” or “10.36” aptamer, that is responsible for binding Burkitt Lymphoma cells. We reported characterization of the structure of Aptamer C10.36 in Opazo et al., Modular Assembly of Cell-targeting Devices Based on an Uncommon G-quadruplex Aptamer, Molecular Therapy-Nucleic Acids (2015) 4, e251; doi:10.1038/mtna.2015.25; published online 1 Sep. 2015; which publication is incorporated by reference herein in its entirety.

[1154] The oligonucleotide sequences in Table 27 comprise various combinations of C10.36 linked to anti-C1q aptamers of the invention (i.e., B1 (SEQ ID NO. 1472) and B11 (SEQ ID. NO. 1482) derivatives as indicated). These oligonucleotides can be further modified to assess the effects of various subsequences and structural conformation on the ability to bind cancer cells. For example, the modifications can be based on the secondary structure of the oligonucleotides as estimated using mFold. Exemplary rationally designed modifications are shown in Table 27. The sequences may further comprise desired modification such as a 5′ Biotin motif. The “Name” column indicates the sequence and/or modifications thereof. For example, “C10.36” is the functional truncation of the C10 aptamer as described. Beneath are truncations (“TrXX-YY,” where XX is the start position of the truncation and YY is the end position of the truncation as compared to the parent), substitutions (e.g., T(57)G indicating that T at position 57 of the parent sequence is modified to G), and combinations thereof. The italicized and underlined sequences highlight the 5′-ACAATCC consensus sequence (SEQ ID NO. 4151) described above.

TABLE 27
C10.36 truncated oligonucleotide and
derivatives

| | | SEQ |
|---|---|---|
| | | ID |
| Name | Sequence | NO. |
| C10.36 | CTAACCCCGGGTGTGGTGGGTGGGCAGGG | 4357 |
| | GGGTTAG | |
| C10.36_ | CTAACCCCGGGTGTGGTGGGTGGGCAGGG | 4358 |
| B1_T(5 | GGGTTAGATAGAACAATCCACCGCTTTAA | |
| 7)G_ | ATCAACTATCTGACTGTCTCTTATACACA | |
| Tr24-76 | TC | |
| B1_ | ATAGAACAATCCACCGCTTTAAATCAACT | 4359 |
| T(57)G_ | ATCTGACTGTCTCTTATACACATCCTAAC | |
| Tr2 | CCCGGGTGTGGTGGGTGGGCAGGGGGGTT | |
| 4-76_ | AG | |
| C10.36 | | |
| B1_ | ATAGAACAATTCACCGCTTTAAATCAACT | 4360 |
| C(29)T_ | ATCTGACTGTCTCTTATACACATCCTAAC | |
| T(5 | CCCGGGTGTGGTGGGTGGGCAGGGGGGTT | |
| 7)G_ | AG | |
| Tr24- | | |
| 76_ | | |
| C10.36 | | |
| C10.36_ | CTAACCCCGGGTGTGGTGGGTGGGCAGGG | 4361 |
| 83s | GGGTTAGACGTACTATAGAACAATCCACC | |
| B1_ | GCTTTAAATCAACTATCTTACTGT | |
| Tr17-62 | | |
| 83s B1_ | ACGTACTATAGAACAATCCACCGCTTTAA | 4362 |
| Tr17- | ATCAACTATCTTACTGTCTAACCCCGGGT | |
| 62_ | GTGGTGGGTGGGCAGGGGGGTTAG | |
| C10.36 | | |
| C10.36_ | CTAACCCCGGGTGTGGTGGGTGGGCAGGG | 4363 |
| 83s | GGGTTAGGTACTATAGAACAATCCACCGC | |
| B1_ | TTTAAATCAACTATCTTAC | |
| Tr19-59 | | |
| B1_ | GTACTATAGAACAATCCACCGCTTTAAAT | 4364 |
| Tr19- | CAACTATCTTACCTAACCCCGGGTGTGGT | |
| 59_ | GGGTGGGCAGGGGGGTTAG | |
| C10.36_ | | |
| 83s | | |
| C10.36_ | CTAACCCCGGGTGTGGTGGGTGGGCAGGG | 4365 |
| 83s | GGGTTAGACGTACGATAGAACAATCCACC | |
| B1_ | GCTTTAAATCAACTATCTTACTGT | |
| Tr17- | | |
| 62T(23) | | |
| G | | |
| 83s B1_ | ACGTACGATAGAACAATCCACCGCTTTAA | 4366 |
| Tr17- | ATCAACTATCTTACTGTCTAACCCCGGGT | |
| 62T(23) | GTGGTGGGTGGGCAGGGGGGTTAG | |
| G_ | | |
| C10.36 | | |
| C10.36_ | CTAACCCCGGGTGTGGTGGGTGGGCAGGG | 4367 |
| 83s_B1 | GGGTTAGGTAACCCAATTCACATAC | |
| 1_ | | |
| Tr19-35 | | |
| 83s_B1l_ | GTAACCCAATTCACATACCTAACCCCGGG | 4368 |
| Tr19- | TGTGGTGGGTGGGCAGGGGGGTTAG | |
| 35_ | | |
| C10.36 | | |

### Example 28: Aptamer C10.36 Binds a Ribonucleoprotein Complex

[1155] We reported that aptamer C10.36 (SEQ ID NO. 4357) forms a G-quadruplex structure and is taken up by Burkitt's Lymphoma (Ramos) cells via a clathrin-mediated endocytotic pathway. Opazo et al. This aptamer is taken up by Ramos cells to a greater extent than other lymphoma derived cell lines (e.g., Jurkat, Raji, or P12). Opazo et al. In this Example, we report identification of the target of aptamer C10.36.

[1156] A single point mutant in aptamer C10.36, C10.36(G24A) (SEQ ID NO. 4369), disrupts the G-quadruplex structure and results in loss of binding to Ramos cells. Opazo et al. This point mutant was used as a control in the aptamer precipitation experiments in this Example to control for non-specific binding to nucleic acid binding proteins.

[1157] Preferential Binding to Ramos Cells:

[1158] A titration of C10.36 and C10.36(G24A) demonstrated binding of C10.36 preferentially to Ramos cells and lack of binding to C10.36(G24A) to either Ramos or Jurkat cells. See FIG. 18A. Panels i-ii show results of flow cytometry with Ramos cells and panels iii-iv show results with Jurkat cells. Panels i and iii show results with aptamer C10.36 and panels ii and iv show results with control aptamer C10.36(G24A). To perform these experiments, aptamer stocks were diluted to 10 μM in Hank's Buffered Salt Solution (HBSS), denatured, and allowed to cool to room temperature for 15 minutes. They were further incubated with streptavidin, R-phycoerythrin conjugate (SAPE; at 1 SAPE molecule per 4 aptamer molecules) for 30 minutes at room temperature in the dark, then diluted in the appropriate media (RPMI medium (Gibco)-10% serum, 0.1 mg/mL sheared salmon sperm DNA (sssDNA), 0.1 mg/mL yeast tRNA, 0.01 mM dextran sulfate, with or without prior heat inactivation of serum). The cells were washed, counted, and resuspended in media. They were then incubated with diluted aptamers and SAPE in media for 15 min at 37° C., 5% CO₂. After incubation with aptamers, cells were washed twice with HBSS, then resuspended in HBSS for flow analysis on Apogee flow cytometry platform (Apogee Flow Systems Ltd, Middlesex, England).

[1159] As seen in FIG. 18A, SAPE by itself had the same binding pattern as unstained flow experiments under all conditions. Ramos cells had a clear positive population at all C10.36 concentrations with titration effect seen with increasing concentration of C10.36 (i.e., 200 nM to 800 nM, as indicated). See panel i. Jurkat cells were dimly positive at the highest concentration of C10.36 aptamer, 800 m. See panel iii. All cells were negative for C10.36(G24A) staining. See panels ii and iv. Slightly brighter staining of Ramos cells was observed in media comprising heat-inactivated serum. Data not shown.

[1160] Target Identification:

[1161] Targets of C10.36 were assessed by affinity purification of aptamers bound to Ramos or Jurkat cells with streptavidin Dynabeads® (ThermoFisher, Sci). Proteins eluted from the beads were separated by SDS-PAGE and detected by silver stain. Protocol used as follows:

[1162] 1. Pellet appropriate volume of cells by centrifuging for 5 minutes at room temperature (RT) at 500×g.

[1163] 2. Aspirate media.

[1164] 3. Resuspend cells in 500 μL binding buffer (see above for flow cytometry) to provide 2×10\hat{ }5 cells per reaction.

[1165] 4. Aptamers: dilute aptamer to 10 μM stock and heat denature for 5 min at 95° C.; allow to cool 15 min on bench.

[1166] 5. Dilute aptamer stock to a working stock using binding buffer.

[1167] 6. Add 50 μl of aptamer to each well of a 96 well deep plate.

[1168] 7. Add 50 μl of cells to the above wells.

[1169] 8. Briefly tap/mix the samples.

[1170] 9. Incubate 15 minutes at 37° C., 5% CO₂.

[1171] 10. Add 10 μL of Dynabeads® MyOne™ Streptavidin C1 to all the wells (Thermo Fisher Scientific).

[1172] 11. Incubate beads with aptamer-cell solution for 30 mins at RT mixing.

[1173] 12. Discard supernatant via magnetic capture with a MagMax™ platform (Thermo Fisher Scientific).

[1174] 13. Wash beads twice with 200 μL of 1×HBSS.

[1175] 14. Lyse cells with 200 μl lysis buffer (50 mM Tris-HCl, 3 mM MgCl₂, 150 mM NaCl, 1% NP40, 0.5% sodium deoxycholate, pH 7.5) for 15 min at RT. Mix on Magmax.

[1176] 15. Wash again with with 200 μL of 1×HBSS

[1177] 16. Elute sample with 15 μL 0.3% TFA, 6M Urea heat 37° C. for 10 min: transfer supernatant to fresh tube then add 5 μL of 4×LDS, 2 μL of 10× reducing agent

[1178] 17. To remaining beads at 22 μL of 1×LDS, 1× reducing agent, boil for 15 min at 95° C., freeze at −20 C

[1179] 18. Run 4-12% SDS-PAGE of TFA/Urea eluted samples

[1180] 19. Silver stain gels

[1181] 20. Cut out bands and process to in gel trypsin digestion

[1182] An exemplary gel is shown in FIG. 18B. Lanes in the Gel are shown in Table 28:

TABLE 28
Silver staining gel lanes

| Lane | Cells | |
|---|---|---|
| kDa | Molecular weight marker | Aptamer |
| 1 | Ramos | 10.36 |
| 2 | Ramos | 10.36(G24A) |
| 3 | Ramos | None |
| 4 | Jurkat | 10.36 |
| 5 | Jurkat | 10.36(G24A) |
| 6 | Jurkat | None |

[1183] As shown in FIG. 18B, few proteins bound to the G24A (lanes 2, 5) or no aptamer (lanes 3, 6) control beads in either Ramos or Jurkat cells. Two duplicate gels were run for 10 min, the entire lane was cut out in one band and subjected to in-gel trypsin digestion and LC-MS/MS. See, e.g., Example 16. Sixty-five of 81 identified proteins were identified as differentially binding to Ramos vs. Jurkat cells with at least a 2-fold change, suggesting these proteins are related to the difference in binding between Ramos and Jurkat cells. Of these, 51 were unique to C10.36 bound to Ramos cells. See Table 29. Accession numbers in the table are from the UniProt database (www.uniprot.org). “GN=” is followed by the gene name. Proteins in the table are sorted by level detected in Ramos cells, from high to low. The most abundant proteins included components of nucleolin containing complexes nucleolin (NCL), nucleophosmin (NPM1), actin (ACTB), heterogeneous nuclear ribonucleoproteins (HNRNP) (Pinol-Roma, Hovanessian et al.) as well as other nucleoproteins. The table indicates the fold change in Ramos cells as compared to Jurkat cells. “n/d” indicates that the protein was observed in Ramos but not detected in Jurkat cells.

TABLE 29
Proteins differentially binding to Ramos vs. Jurkat cells

| Accession | | Fold Change |
|---|---|---|
| Number | Protein Name | (Ramos/Jurkat) |
| P19338 | Nucleolin GN = NCL | 3.0 |
| P22626 | Cluster of heterogeneous nuclear ribonucleoproteins A2/B1 | 2.0 |
| P06748 | Cluster of Nucleophosmin GN = NPM1 | 8.0 |
| P60709 | Cluster of Actin, cytoplasmic 1 | 5.3 |
| P22087 | rRNA 2′-O-methyltransferase fibrillarin | 4.0 |
| P09651 | Cluster of Heterogeneous nuclear ribonucleoprotein A1 | 2.0 |
| Q04837 | Single-stranded DNA-binding protein, mitochondrial | 5.5 |
| P11142 | Heat shock cognate 71 kDa protein | n/d |
| Q00839 | Heterogeneous nuclear ribonucleoprotein U | 8.0 |
| P52272 | Heterogeneous nuclear ribonucleoprotein M | 7.0 |
| Q07955 | Serine/arginine-rich splicing factor 1 | 7.0 |
| P55769 | NHP2-like protein 1 | n/d |
| Q12906 | Interleukin enhancer-binding factor 3 | n/d |
| P06576 | ATP synthase subunit beta, mitochondrial | n/d |
| P31942 | Cluster of Heterogeneous nuclear ribonucleoprotein H3 | 6.0 |
| Q86V81 | THO complex subunit 4 | 2.0 |
| Q9NR30 | Nucleolar RNA helicase 2 | n/d |
| Q96PK6 | RNA-binding protein 14 | n/d |
| P37108 | Signal recognition particle 14 kDa protein | n/d |
| P09874 | Poly [ADP-ribose] polymerase 1 | n/d |
| P17096 | Cluster of High mobility group protein HMG-I/HMG-Y | n/d |
| Q99729 | Heterogeneous nuclear ribonucleoprotein A/B | n/d |
| P11021 | 78 kDa glucose-regulated protein | n/d |
| P23246 | splicing factor, proline- and glutamine-rich | n/d |
| P27694 | Replication protein A 70 kDa DNA-binding subunit | n/d |
| Q13151 | Heterogeneous nuclear ribonucleoprotein A0 | n/d |
| P04792 | Heat shock protein beta-1 | n/d |
| P31943 | Heterogeneous nuclear ribonucleoprotein H | n/d |
| P51991 | Cluster of Heterogeneous nuclear ribonucleoprotein A3 | 4.0 |
| P02647 | Apolipoprotein A-I | n/d |
| O43390 | heterogeneous nuclear ribonucleoprotein r | n/d |
| P08865 | 40S ribosomal protein SA | n/d |
| O14979 | Cluster of Heterogeneous nuclear ribonucleoprotein D-like | n/d |
| Q15365 | Cluster of Poly(RC)-binding protein 1 | n/d |
| P26599 | Polypyrimidine tract-binding protein 1 | n/d |
| Q14624 | Inter-alpha-trypsin inhibitor heavy chain H4 | n/d |
| Q14103 | heterogeneous nuclear ribonucleoprotein D0 | n/d |
| P04406 | glyceraldehyde-3-phosphate dehydrogenase | n/d |
| O60506 | Heterogeneous nuclear ribonucleoprotein Q | n/d |
| Q15717 | ELAV-like protein 1 | n/d |
| Q8NFH5 | Nucleoporin NUP53 | n/d |
| Q9NX24 | H/ACA ribonucleoprotein complex subunit 2 | 2.0 |
| P01009 | alpha-1-antitrypsin | n/d |
| Q14978 | nucleolar and coiled-body phosphoprotein 1 | n/d |
| P10809 | 60 kDa heat shock protein, mitochondrial | n/d |
| P14866 | Heterogeneous nuclear ribonucleoprotein L | n/d |
| Q13243 | Cluster of Serine/arginine-rich splicing factor 5 | n/d |
| Q6RFH5 | WD repeat-containing protein 74 | n/d |
| Q9NZI8 | Insulin-like growth factor 2 mRNA-binding protein 1 | n/d |
| P46087 | Probable 28S rRNA (cytosine(4447)-C(5))-methyltransferase | n/d |
| P18754 | Regulator of chromosome condensation | n/d |
| P11940 | Cluster of Polyadenylate-binding protein 1 | n/d |
| P25705 | ATP synthase subunit alpha, mitochondrial | n/d |
| Q15173 | Serine/threonine-protein phosphatase 2A 56 kDa regulatory | n/d |
| | subunit beta isoform GN = PPP2R5B | |
| Q9Y3B9 | RRP15-like protein | n/d |
| Q9Y3Y2 | Chromatin target of PRMT1 protein | n/d |
| P84103 | Serine/arginine-rich splicing factor 3 | n/d |
| P30154 | Serine/threonine-protein phosphatase 2A 65 kDa regulatory | n/d |
| | subunit A beta isoform GN = PPP2R1B | |
| Q00577 | Transcriptional activator protein Pur-alpha | n/d |
| 1A31_HUMAN | HLA class I histocompatibility antigen, A-31 alpha chain | n/d |
| | GN = HLA-A | |
| O00479 | High mobility group nucleosome-binding domain-containing | n/d |
| | protein 4 | |
| P62263 | 40S ribosomal protein S14 | n/d |
| Q16629 | serine/arginine-rich splicing factor 7 | n/d |
| P52907 | F-actin-capping protein subunit alpha-1 | n/d |
| Q12905 | Interleukin enhancer-binding factor 2 | n/d |

[1184] Aptamer C10.36 is internalized by Ramos cells through a clathrin dependent mechanism at the cell surface. See Opazo et al. Both NCL and NPM1 have both been shown to be expressed on the cell surface of cancer cells and together regulate K-Ras signaling. See Gervin et al.; Inder et al. Ribonucleoprotein containing structures have been shown to accumulate on the cell surface of apoptotic cells. See Biggiogera et al. for review. To assess whether aptamer C10.36 could bind nucleolin at the cell-surface, aptamer precipitations were conducted in the presence of 80 μM Dynasore®, which inhibits clathrin mediated endocytosis. For methodology, see Opazo et al; Kirchhausen et al. To reduce viscosity of the cellular lysate, endonuclease HL-dsDNase, which specifically cleaves dsDNA but does not degrade the single stranded DNA aptamer (data not shown), was added to the lysis buffer at a final concentration of 4 Units per 100 μl. The number of total proteins identified by LC-MS/MS from gel bands run in triplicate in the presence of endonuclease HL-dsDNase was much lower and was similar with and without Dynasore®. See FIG. 18C. In the figure, lanes are indicated in Table 30. Panels i, ii and iii are triplicate gels. Consistent with the flow cytometry results described above, higher levels of protein were detected with Ramos cells and aptamer C10.36 as opposed to Jurkat cells or control aptamer C10.36(G24A).

TABLE 30
Silver stained gel lanes

| Lane | Cells | Aptamer | Dynasore |
|---|---|---|---|
| 1 | Mol Weight Ladder | n/a | n/a |
| 2 | Ramos | 10.36 | + |
| 3 | Ramos | 10.36 | − |
| 4 | Ramos | 10.36(G24A) | + |
| 5 | Ramos | 10.36(G24A) | − |
| 6 | Jurkat | 10.36 | + |
| 7 | Jurkat | 10.36 | − |
| 8 | Jurkat | 10.36(G24A) | + |
| 9 | Jurkat | 10.36(G24A) | − |

[1185] Eight proteins were differentially bound to C10.36 and Ramos cells and included NCL, FBL, hnRNP C1/C2, SFPQ and DDX21. See Table 31. The last column in the table indicates the fold change in Ramos cells (R) as compared to Jurkat cells (J), in the presence (+) or absence (−) of Dynasore. “n/d” indicates that the protein was observed in Ramos but not detected in Jurkat cells. Dynasore inhibits internalization of C10.36 (see Opazo et al) but made minimal difference on the proteins we detected under our conditions. NCL, NMP 1 and DDX21 have been shown to directly bind G-quadruplex DNA structures. See Arcovito et al.; Girvan et al.; Tosoni et al.; Brazda, et al.; Mendoza et al. SFPQ was originally described as a myoblast cell surface antigen and is a DNA- and RNA binding protein, involved in several nuclear processes. See Gower et al. DDX21 is a nucleolar helicase that can unfold Q-quadruplex structures. See Mendoza et al. To our knowledge this is the first time the translational control proteins SFPQ and DDX21 have been identified co-precipitating with cell surface complexes comprising nucleolin.

TABLE 31
Proteins differentially binding to Ramos vs. Jurkat cells

| Accession | | Fold Change (R/J) |
|---|---|---|
| Number | Protein Name | Dynasore +/− |
| P13645 | Cluster of Keratin, type I cytoskeletal | 7.6/1.2 |
| | 10 | |
| P07910 | Heterogeneous nuclear | 1.3/4.9 |
| | ribonucleoproteins C1/C2 | |
| | (hnRNP C1/C2) GN = HNRNPC | |
| P19338 | Nucleolin GN = NCL | n/d/n/d |
| P23246 | splicing factor, proline- and | 2.6/n/d |
| | glutamine-rich (SFPQ) | |
| Q7L8J4 | SH3 domain-binding protein 5-like | n/d/4.1 |
| | GN = SH3BP5L | |
| P14923 | Junction plakoglobin | n/d/n/d |
| P22087 | rRNA 2′-O-methyltransferase | n/d/n/d |
| | fibrillarin GN = FBL | |
| Q9NR30 | Nucleolar RNA helicase 2 GN = | n/d/n/d |
| | DDX21 | |

[1186] To increase the yield of the surface target proteins or protein complexes and limit endocytotic aptamer internalization, ˜1 μg of aptamer C10.36 and control aptamer C10.36(G24A) were immobilized to ˜1 μm streptavidin Dynabeads (ThermoFisher, Sci). Ramos or Jurkat cells were captured from the solution using the beads in the presence of Dynasore and endonuclease HL-dsDNase. As above, differential detection by LC-MS/MS analysis of digests of triplicate gel bands (not shown) found ribonucleoproteins precipitated with the C10.36 aptamer specifically in Ramos cells. See Table 32. Accession numbers in the table are from the UniProt database (www.uniprot.org). “GN=” is followed by the gene name. Proteins in the table are sorted by level detected in Ramos cells, from high to low. The table indicates the fold change in Ramos cells as compared to Jurkat cells. “n/d” indicates that the protein was observed in Ramos but not detected in Jurkat cells.

TABLE 32
Proteins differentially binding to Ramos vs. Jurkat cells

| Accession | | Fold Change |
|---|---|---|
| Number | Protein Name | (Ramos/Jurkat) |
| P16403 | Cluster of Histone H1.2 | 9.2 |
| P19338 | Nucleolin | 4.4 |
| P07910 | Cluster of Heterogeneous nuclear | n/d |
| | ribonucleoproteins C1/C2 | |
| P23246 | splicing factor, proline- and glutamine-rich | 10.0 |
| P22626 | heterogeneous nuclear ribonucleoproteins | 14.0 |
| | A2/B1 | |
| P60709 | Cluster of Actin, cytoplasmic 1 | 7.0 |
| P09651 | Heterogeneous nuclear ribonucleoprotein A1 | 13.5 |
| P22087 | rRNA 2′-O-methyltransferase fibrillarin | n/d |
| Q9NR30 | Nucleolar RNA helicase 2 | n/d |
| P55769 | NHP2-like protein 1 | n/d |
| Q13151 | Heterogeneous nuclear ribonucleoprotein A0 | n/d |
| P62633 | Cellular nucleic acid-binding protein | n/d |
| P31942 | Heterogeneous nuclear ribonucleoprotein H3 | n/d |
| P61978 | Heterogeneous nuclear ribonucleoprotein K | n/d |
| P09874 | Poly [ADP-ribose] polymerase 1 | n/d |
| P46087 | Probable 28S rRNA (cytosine(4447)-C(5))- | n/d |
| | methyltransferase | |
| P35268 | 60S ribosomal protein L22 | n/d |
| Q01844 | RNA-binding protein EWS | n/d |
| Q9UKM9 | RNA-binding protein Raly | n/d |
| Q14978-1 | nucleolar and coiled-body phosphoprotein 1 | n/d |
| Q86V81 | THO complex subunit 4 | n/d |
| P62750 | 60S ribosomal protein L23a | n/d |
| P06748 | Nucleophosmin | n/d |
| Q9NZI8 | Insulin-like growth factor 2 mRNA-binding | n/d |
| | protein 1 | |
| P68431 | Histone H3.1 | n/d |
| Q9NX24 | H/ACA ribonucleoprotein complex subunit 2 | n/d |
| P27694 | Replication protein A 70 kDa DNA-binding | n/d |
| | subunit | |
| O43390 | Cluster of heterogeneous nuclear | n/d |
| | ribonucleoprotein r | |
| P67809 | Nuclease-sensitive element-binding protein 1 | n/d |
| Q96PK6 | RNA-binding protein 14 | n/d |
| Q12906 | Interleukin enhancer-binding factor 3 | n/d |
| P37108 | Signal recognition particle 14 kDa protein | n/d |
| Q12905 | Interleukin enhancer-binding factor 2 | n/d |
| P11142 | Heat shock cognate 71 kDa protein | n/d |
| Q00839 | Heterogeneous nuclear ribonucleoprotein U | n/d |
| P50914 | 60S ribosomal protein L14 | n/d |
| P11021 | 78 kDa glucose-regulated protein | n/d |
| P31943 | Heterogeneous nuclear ribonucleoprotein H | n/d |
| Q8TEM1 | Nuclear pore membrane glycoprotein 210 | n/d |

[1187] Four proteins were identified as differentially bound in all the experimental conditions tested as shown in Tables 29, 31 and 32: NCL, FBL, SFPQ, and DDX21. Without being bound by theory, these data indicate that aptamer C10.36 binds a ribonucleoprotein complex comprising multiple proteins including without limitation nucleolin, hnRNP U, fibrillarin, actin, SFPQ, hnRNPM, hnRNPC1/C2. To examine which proteins C10.36 binds directly as opposed to indirectly as part of a ribonucleoprotein complex, we increased the stringency of salt in the wash buffers from 133 mM to 1M NaCl in the presence of Dynasore. FIG. 18D shows gels run at the indicated salt concentrations (i.e., panel i=250 mM; panel ii=500 mM; panel iii=1M). Lanes in the gel are shown in Table 33. Lane 1 is a molecular weight (MW) marker.

TABLE 33
Silver staining gel lanes

| Lane | Cells | Aptamer |
|---|---|---|
| 1 | MW | |
| 2 | Ramos | 10.36 |
| 3 | Ramos | 10.36(G24A) |
| 4 | Ramos | AS1411 |
| 5 | Ramos | CRO26 |
| 6 | Jurkat | 10.36 |
| 7 | Jurkat | 10.36(G24A) |
| 8 | Jurkat | AS1411 |
| 9 | Jurkat | CRO26 |

[1188] We compared aptamer C10.36 to aptamer AS1411 (SEQ ID NO. 4370), an anti-NCL homodimeric DNA aptamer that binds specifically to cancer cells, and CRO26 (SEQ ID NO. 4371), a biologically inactive control oligonucleotide. See Reyes-Reyes et al.; Soundararajan et al. See FIG. 18D and Table 33. AS 1411 had no detectable binding to Ramos or Jurkat cells under our affinity purification experimental conditions. See FIG. 18D, lanes 4, 8. To assess whether immobilization of the aptamer disrupted its ability to homodimerize, binding was repeated in-solution. These experiments were carried out as follows:

[1189] 1. Pellet appropriate volume of cells by centrifuging for 5 minutes at RT, 500×g

[1190] 2. Aspirate media.

[1191] 3. Resuspend cells 500 μL binding buffer (same as described above) to provide 1×10\hat{ }5 cells per reaction

[1192] 4. Aptamers: dilute aptamer to 10 μM stock and heat denature for 5 min at 95° C.; allow to cool 15 min on bench

[1193] 5. Dilute aptamer stock to a working stock using binding buffer containing Dynasore to inhibit endocytosis of aptamer

[1194] 6. Add 50 μl of aptamer to each well of a 96 well deep plate

[1195] 7. Add 50 μl of cells to the above wells

[1196] 8. Briefly tap/mix the samples

[1197] 9. Incubate 15 minutes at 37 C, 5% CO₂

[1198] 10. Add 10 μL of Dynabeads MyOne™ Streptavidin C1 to all the wells

[1199] 11. Incubate beads with Aptamer-cell solution for 30 mins at RT mixing

[1200] 12. Discard supernatant

[1201] 13. Wash beads twice with 200 μL of 1×HBSS.

[1202] 14. Lyse cells with 200 μl lysis buffer for 30 min at rm temp Mix on Magmax

[1203] 15. Wash again with with 200 μL of 1×HBSS

[1204] 16. Elute sample with 1% Rapigest heat 37° C. for 10 min

[1205] 17. Run one replicate for silver stain and one for anti-nucleolin western blot

[1206] 18. Run 4-12% SDS-PAGE gel

[1207] 19. Silver stain gel or proceed to western blot

[1208] 20. Process remaining replicates in solution digestion

[1209] FIG. 18E, panel i, shows that greater levels of protein precipitated with aptamers C10.36 (lane 2) and AS 1411 (lane 4) in Ramos cells than controls (i.e., C10.36(G24A) (lane 4) or CR026 (lane 5)) or with Jurkat cells. However, nucleolin was not detected bound to AS 1411 in Ramos cells by Western blot with an anti-NCL antibody (lane 5) under our experimental conditions. See FIG. 18E, panel ii. Lanes in the figure are shown in Tables 34 (panel i) and 35 (panel ii). Lane 1 in Table 34 and Lane 2 in Table 35 indicate molecular weight (MW) marker ladders at the weights indicated in kiloDaltons (kDa). In Table 35, lane 1 refers to 50 ng of recombinant purified nucleolin protein. The position of nucleolin is indicated by the arrow in FIG. 18E, panel ii.

TABLE 34
Silver staining gel

| Lane | Cells | Aptamer |
|---|---|---|
| 1 | MW | |
| 2 | Ramos | 10.36 |
| 3 | Ramos | G24A |
| 4 | Ramos | AS1411 |
| 5 | Ramos | CRO26 |
| 6 | Jurkat | 10.36 |
| 7 | Jurkat | G24A |
| 8 | Jurkat | AS1411 |
| 9 | Jurkat | CRO26 |

TABLE 35
Western blot with anti-nucleolin antibody (anti-NCL ab)

| Lane | Cells | Aptamer |
|---|---|---|
| 1 | 50 ng rec. NCL | |
| 2 | MW | |
| 3 | Ramos | 10.36 |
| 4 | Ramos | G24A |
| 5 | Ramos | AS1411 |
| 6 | Ramos | CRO26 |

[1210] To further explore target binding of aptamer C10.36, the aptamer was conjugated to crosslinking agent SBED. See Example 15 above. To perform these experiments, SBED labeled C10.36 aptamer or SBED labeled C10.36(G24A) control aptamer were incubated with Ramos cells. After incubation to allow binding of the aptamers to their targets, the aptamer-target complexes were photo-crosslinked with UV light. Cross-linked complexes were affinity purified and eluted proteins were washed under very stringent conditions (2M NaCl), eluted by boiling in LDS sample buffer, and run on SDS-PAGE for 10 min for clean up. The entire lane was extracted, digested with trypsin, and peptides were detected by LC-MS/MS and identified with Protein Discoverer (Thermo) with SBED as a dynamic modification. Table 36 lists proteins identified with an SBED modification. Accession numbers in the table are from the UniProt database (www.uniprot.org). “GN=” is followed by the gene name. Proteins in the table are sorted by level detected in Ramos cells, from high to low. IL3RA (CD123) expression is correlated with leukemia and lymphomas and affects proliferation. See Gupta et al.; Zhang et al; Ehninger et al. JMJD1C family member JMJD2 has been shown to be required for expression of Il13RA and survival of acute myeloid leukemia cells. Agger et al. RanBP2 forms a fusion protein with ALK (UniProt Q9UM73) that has been observed in lymphomas. See Galietta et al; Vassileva et al. ALK also forms a fusion with nucleophosmin, which we identified along with nucleolin, fibrillarin, actin, SFPQ, hnRNPM, hnRNPC1/C2 and other proteins. See above.

TABLE 36
SBED-linked proteins binding to Ramos cells

| Accession | Description |
|---|---|
| P26951-1 | Interleukin-3 receptor subunit alpha GN = IL3RA |
| P49792 | E3 SUMO-protein ligase RanBP2 GN = RANBP2 |
| Q701N4 | keratin-associated protein 5-2 GN = KRTAP5-2 |
| Q9Y694-1 | Solute carrier family 22 member 7 GN = SLC22A7 |
| Q15652 | probable JmjC domain-containing histone demethylation |
| | protein 2C GN = JMJD1C |

[1211] We also assessed whether aptamer C10.36 would bind the prostate cancer cell line DU145 and breast cancer cell line MCF7. Aptamer pull-down experiments using bead captured aptamers was performed as above. We used ˜500 ng of aptamer per 10 μL of beads per reaction and 2.5×10⁵ cells per reaction. Results were compared to aptamer AS 1411. In addition, the aptamers were biotinylated on either the 5′ or 3′ ends to determine whether biotin placement affected aptamer binding. Results with Ramos cells and DU145 cells are shown in FIG. 18F. Lanes in the gel are shown in Table 37. As shown in the figure, C10.36 precipitated many proteins in Ramos cells, regardless of the position of the biotin (lanes 2 and 4), but did not pull down proteins in DU145 cells. Similar results to DU145 were observed with MCF7 cells (data not shown). Under our experimental conditions, AS1411 did not precipitate detectable protein in any case although AS1411 has previously been reported to kill DU145 cells. See Bates et al. Without being bound by theory, any differences may be due to experimental conditions such as dextran sulfate in our buffer.

TABLE 37
Lanes in silver stained gel

| Lane | Cells | Aptamer | Biotin position |
|---|---|---|---|
| 1 | MW | | |
| 2 | Ramos | 10.36 | 5′ Biotin |
| 3 | Ramos | AS1411 | 5′ Biotin |
| 4 | Ramos | 10.36 | 3′ Biotin |
| 5 | Ramos | AS1411 | 3′ Biotin |
| 6 | DU145 | 10.36 | 5′ Biotin |
| 7 | DU145 | AS1411 | 5′ Biotin |
| 8 | DU145 | 10.36 | 3′ Biotin |
| 9 | DU145 | AS1411 | 3′ Biotin |

[1212] We performed pull-down experiments to identify proteins that precipitate with aptamer C10.36 in Ramos cells. Conditions were as above and included 1×10⁵ cells per reaction, both binding steps at 4° C. for 30 mins, lysis for 30 min, and additions of HL-dsDNAse to shear genomic DNA, various concentrations of non-biotinylated C10.36 competitor, and Dynasore to inhibit endocytosis. Macropinocytosis (and other forms of internalization) are inhibited at 4° C. Proteins were run on triplicate silver stained gels as shown in FIG. 18G. Lanes in the gel are as in Table 38. Various concentrations of non-biotinylated C10.36 competitor are shown in Table 38. As shown in FIG. 18G, only the highest concentrations of competitor appeared to reduce binding, indicating that the binding of biotinylated C10.36 is not saturated under our experimental conditions.

TABLE 38
Lanes in silver stained gel

| Lane | Cells | Aptamer | Competitor |
|---|---|---|---|
| 1 | MW | | |
| 2 | Ramos | 10.36 | None |
| 3 | Ramos | 10.36 | 1XNon-Bio C10.36 |
| 4 | Ramos | 10.36 | 10XNon-Bio C10.36 |
| 5 | Ramos | 10.36 | 100XNon-Bio C10.36 |

[1213] We performed differential detection by LC-MS/MS analysis of digests of different gel bands indicated in FIG. 18G for one gel (the “fractionated” gel; FIG. 18G) and for two otherwise identical gels used LC-MS/MS analysis of the entire gel lane (the “unfractionated” gels; not shown). See Tables 39-40. Accession numbers in the tables are from the UniProt database (www.uniprot.org). The column “Band” in Table 39 indicates the band the gel shown in FIG. 18G. For each band, the proteins are listed in order of abundance. Table 40 lists proteins identified in the two unfractionated gels. These proteins are also indicated by their appearance in the bands in FIG. 18G.

TABLE 39
Proteins precipititated with aptamer C10.36 in Ramos cells

| Band | Accession | Gene ID | Description |
|---|---|---|---|
| 1 | P09874 | PARP1 | Poly [ADP-ribose] polymerase 1 |
| | P19338 | NCL | Nucleolin |
| | P46087-4 | NOP2 | Isoform 4 of Probable 28S rRNA (cytosine(4447)- |
| | | | C(5))-methyltransferase |
| | Q00839 | HNRNPU | Heterogeneous nuclear ribonucleoprotein U |
| | Q13435 | SF3B2 | Splicing factor 3b subunit 2 |
| 2 | P23246-1 | SFPQ | splicing factor, proline- and glutamine-rich |
| | P19338 | NCL | Nucleolin |
| | Q9NR30-1 | DDX21 | Nucleolar RNA helicase 2 |
| | P46087-4 | NOP2 | Isoform 4 of Probable 28S rRNA (cytosine(4447)- |
| | | | C(5))-methyltransferase |
| | Q00839 | HNRNPU | Heterogeneous nuclear ribonucleoprotein U |
| | P11387 | TOP1 | DNA topoisomerase 1 |
| | Q14978-2 | NOLC1 | Isoform Beta of Nucleolar and coiled-body |
| | | | phosphoprotein 1 |
| | P17480-1 | UBTF | Nucleolar transcription factor 1 |
| | Q12906-7 | ILF3 | Isoform 7 of Interleukin enhancer-binding factor 3 |
| 3 | Q9NVP1 | DDX18 | ATP-dependent RNA helicase DDX18 |
| | P11021 | HSPA5 | 78 kDa glucose-regulated protein |
| | Q13769 | THOC5 | THO complex subunit 5 homolog |
| | Q08170 | SRSF4 | Serine/arginine-rich splicing factor 4 |
| | P17844 | DDX5 | probable ATP-dependent RNA helicase DDX5 |
| | P27694 | RPA1 | Replication protein A 70 kDa DNA-binding |
| | | | subunit |
| | P11940-1 | PABPC1 | Polyadenylate-binding protein 1 |
| | O00567 | NOP56 | Nucleolar protein 56 |
| 4 | P60709 | ACTB | Actin, cytoplasmic 1 |
| | P05109 | S100A8 | Protein S100-A8 |
| | Q15233 | NONO | Non-POU domain-containing octamer-binding |
| | | | protein |
| | P06702 | S100A9 | Protein S100-A9 |
| | Q06830 | PRDX1 | peroxiredoxin-1 |
| | P25311 | AZGP1 | Zinc-alpha-2-glycoprotein |
| | P38159-1 | RBMX | RNA-binding motif protein, X chromosome |
| | P07910-1 | HNRNPC | Heterogeneous nuclear ribonucleoproteins C1/C2 |
| | P67809 | YBX1 | Nuclease-sensitive element-binding protein 1 |
| | P36578 | RPL4 | 60S ribosomal protein L4 |
| | Q12905 | ILF2 | Interleukin enhancer-binding factor 2 |
| | Q05639 | EEF1A2 | Elongation factor 1-alpha 2 |
| | O60832-1 | DKC1 | H/ACA ribonucleoprotein complex subunit 4 |
| | Q13601 | KRR1 | KRR1 small subunit processome component |
| | | | homolog |
| | Q15287-1 | RNPS1 | RNA-binding protein with serine-rich domain 1 |
| | P61978-2 | HNRNPK | Isoform 2 of Heterogeneous nuclear |
| | | | ribonucleoprotein K |
| | Q13247 | SRSF6 | Serine/arginine-rich splicing factor 6 |
| | P42696 | RBM34 | RNA-binding protein 34 |
| | Q969G3 | SMARCE1 | SWI/SNF-related matrix-associated actin- |
| | | | dependent regulator of chromatin subfamily E |
| | | | member 1 |
| 5 | P22087 | FBL | rRNA 2′-O-methyltransferase fibrillarin |
| | P06702 | S100A9 | Protein S100-A9 |
| | P04406-1 | GAPDH | glyceraldehyde-3-phosphate dehydrogenase |
| | P07910-2 | HNRNPC | Isoform C1 of Heterogeneous nuclear |
| | | | ribonucleoproteins C1/C2 |
| | Q9UKM9-1 | RALY | RNA-binding protein Raly |
| | P09651-1 | HNRNPA1 | Heterogeneous nuclear ribonucleoprotein A1 |
| | P06748 | NPM1 | Nucleophosmin OS = Homo sapiens GN = NPM1 |
| | | | PE = 1 SV = 2 |
| | Q08188 | TGM3 | Protein-glutamine gamma-glutamyltransferase E |
| | P07355-2 | ANXA2 | Isoform 2 of Annexin A2 |
| 6 | Pl6402 | HIST1H1D | Histone H1.3 |
| | P16401 | HIST1H1B | Histone H1.5 |
| | P62979 | RPS27A | Ubiquitin-40S ribosomal protein S27a |
| | Q9BTM1-2 | H2AFJ | Isoform 2 of Histone H2A.J |
| | P06702 | S100A9 | Protein S100-A9 |
| | Q5D862 | FLG2 | Filaggrin-2 |
| | P30050-1 | RPL12 | 60S ribosomal protein L12 |
| | P05109 | S100A8 | Protein S100-A8 |
| | P31151 | S100A7 | Protein S100-A7 |
| | Q06830 | PRDX1 | peroxiredoxin-1 |
| | P04406-1 | GAPDH | glyceraldehyde-3-phosphate dehydrogenase |
| | Q9NY12-1 | GAR1 | H/ACA ribonucleoprotein complex subunit 1 |
| | P62633-1 | CNBP | Cellular nucleic acid-binding protein |
| | P15927-3 | RPA2 | Isoform 3 of Replication protein A 32 kDa subunit |
| | P62913 | RPL11 | 60S ribosomal protein L11 |
| | Q86V81 | ALYREF | THO complex subunit 4 |
| | P62081 | RPS7 | 40S ribosomal protein S7 |
| | P62750 | RPL23A | 60S ribosomal protein L23a |
| | P14678-3 | | Isoform SM-B1 of Small nuclear |
| | | | ribonucleoprotein-associated proteins B and B′ |
| | Q9BRL6-1 | SRSF8 | serine/arginine-rich splicing factor 8 |
| | Q92522 | H1FX | Histone H1x |
| | Q07020 | RPL18 | 60S ribosomal protein L18 |
| | P26373-1 | RPL13 | 60S ribosomal protein L13 |
| | Q92979 | EMG1 | Ribosomal RNA small subunit methyltransferase |
| | | | Nep1 |
| | P09661 | SNRPA1 | U2 small nuclear ribonucleoprotein A′ |
| 7 | Q04837 | SSBP1 | Single-stranded DNA-binding protein, |
| | | | mitochondrial |
| | P06702 | S100A9 | Protein S100-A9 |
| | P62805 | HIST1H4A; HIST1H4F; HIST1H4D; | histone H4 |
| | | HIST1H4J; HIST2H4A; HIST2H4B; | |
| | | HIST1H4H; HIST1H4C; HIST4H4; | |
| | | HIST1H4E; HIST1H4I; HIST1H4B; | |
| | | HIST1H4K; HIST1H4L | |
| | P05109 | S100A8 | Protein S100-A8 |
| | P62979 | RPS27A | Ubiquitin-40S ribosomal protein S27a |
| | P31151 | S100A7 | Protein S100-A7 |
| | Q5D862 | FLG2 | Filaggrin-2 |
| | P04406-1 | GAPDH | glyceraldehyde-3-phosphate dehydrogenase |
| | P25311 | AZGP1 | Zinc-alpha-2-glycoprotein |
| | P60709 | ACTB | Actin, cytoplasmic 1 |
| | P04908 | HIST1H2AB; HIST1H2AE | histone H2A type 1-B/E |
| | P68431 | HIST1H3F; HIST1H3C; HIST1H3D; | Histone H3.1 |
| | | HIST1H3G; HIST1H3H; HIST1H3B; | |
| | | HIST1H3A; HIST1H3E; HIST1H3I; | |
| | | HIST1H3J | |
| | P55769 | NHP2L1; SNU13 | NHP2-like protein 1 |
| | Q5QNW6-2 | HIST2H2BF | Isoform 2 of Histone H2B type 2-F |
| | P53999 | SUB1 | Activated RNA polymerase II transcriptional |
| | | | coactivator p15 |
| | P37108 | SRP14 | Signal recognition particle 14 kDa protein |
| | P06899 | HIST1H2BJ | Histone H2B type 1-J |
| | P62888 | RPL30 | 60S ribosomal protein L30 |
| | P62899-2 | RPL31 | Isoform 2 of 60S ribosomal protein L31 |
| | P61353 | RPL27 | 60S ribosomal protein L27 |
| | P62318 | SNRPD3 | small nuclear ribonucleoprotein sm d3 |
| | P35268 | RPL22 | 60S ribosomal protein L22 |
| | P69905 | HBA2; HBA1 | Hemoglobin subunit alpha |
| | Q8IUE6 | HIST2H2AB | Histone H2A type 2-B |
| | P62829 | RPL23 | 60S ribosomal protein L23 |
| | P62851 | RPS25 | 40S ribosomal protein S25 |
| | P62263 | RPS14 | 40S ribosomal protein S14 |
| | P62269 | RPS18 | 40S ribosomal protein S18 |
| | P60866-2 | RPS20 | Isoform 2 of 40S ribosomal protein S20 |
| 8 | P62805 | HIST1H4A; HIST1H4F; HIST1H4D; | histone H4 |
| | | HIST1H4J; HIST2H4A; HIST2H4B; | |
| | | HIST1H4H; HIST1H4C; HIST4H4; | |
| | | HIST1H4E; HIST1H4I; HIST1H4B; | |
| | | HIST1H4K; HIST1H4L | |
| | P31151 | S100A7 | Protein S100-A7 |
| | Q5D862 | FLG2 | Filaggrin-2 |
| | P49458 | SRP9; SRP9P1 | Signal recognition particle 9 kDa protein |

TABLE 40
Proteins precipititated with aptamer C10.36 in Ramos cells

| Accession | Gene ID | |
|---|---|---|
| P09874 | PARP1 | Poly [ADP-ribose] polymerase 1 |
| P16401 | HIST1H1B | Histone H1.5 |
| P16402 | HIST1H1D | Histone H1.3 |
| P19338 | NCL | Nucleolin |
| P22087 | FBL | rRNA 2′-O-methyltransferase fibrillarin |
| P23246 | SFPQ | splicing factor, proline- and glutamine-rich |
| P30050 | RPL12 | 60S ribosomal protein L12 |
| P60709 | ACTB | Actin, cytoplasmic 1 |
| P62805 | HIST1H4A | histone H4 |
| Q04837 | SSBP1 | Single-stranded DNA-binding protein, |
| | | mitochondrial |
| Q15233 | NONO | Non-POU domain-containing octamer-binding |
| | | protein |
| Q9BTM1 | H2AFJ | Histone H2A.J |
| Q9NR30 | DDX21 | Nucleolar RNA helicase 2 |

[1214] Taken together, aptamer C10.36 appears to bind a ribonucleoprotein complex on the surface of Ramos cells comprising multiple proteins including without limitation nucleolin, fibrillarin, actin, SFPQ, hnRNPM, and hnRNPC1/C2. See, e.g., Table 40. This binding appears to be specific to Ramos cells as much less protein was pulled down with C10.36 in Jurkat (human T lymphocyte cells from a T cell leukemia patient) or DU145 (prostate cancer cells from a brain metastasis). By silver staining gel, no proteins were observed pulled down in MCF7 (breast cancer) cells.

### REFERENCES

[1215] Opazo F, et al. (2015). Modular Assembly of Cell-targeting Devices Based on an Uncommon G-quadruplex Aptamer Molecular Therapy. Nucleic Acids 4, e251.
[1216] Mayer, G, et al. (2005). Light-induced formation of G-quadruplex DNA secondary structures. Chembiochem 6: 1966-1970.
[1217] Reyes-Reyes, E M, et al. (2010). A new paradigm for aptamer therapeutic AS 1411 action: uptake by macropinocytosis and its stimulation by a nucleolin-dependent mechanism. Cancer Res 70: 8617-8629.
[1218] Pinol-Roma (1999). Association of Nonribosomal Nucleolar Proteins in Ribonucleoprotein Complexes during Interphase and Mitosis. Molecular Biology of the Cell: 10, 77-90.
[1219] Biggiogera, M, et al. (2004). Rearrangement of nuclear ribonucleoprotein (RNP)-containing structures during apoptosis and transcriptional arrest. Biology of the cell 96, 603-615.
[1220] Arcovito A. et al. (2014). Synergic role of nucleophosmin three-helix bundle and a flanking unstructured tail in the interaction with G-quadruplex DNA. J Biol Chem.; 289:21230-41.
[1221] Mellgren R (2011). A new twist on plasma membrane repair. Communicative & Integrative Biology 4:2, 198-200.
[1222] Tosoni et al (2015). Nueclolin stabilizes G-quadruplex structures folded by the LTR promorter and silences HIV-1 viral transcription. Nucleic Acids Research 43:8884-97.
[1223] Girvan AC, et al. (2006). AGRO 100 inhibits activation of nuclear factor-kappaB (NF-kappaB) by forming a complex with NF-kappaB essential modulator (NEMO) and nucleolin. Mol Cancer Ther. 5:1790-9.
[1224] Brizda V, et al. (2014). DNA and RNA Quadruplex-Binding Proteins. Int. J. Mol. Sci. 15, 17493-17517.
[1225] Inder K L, et al. (2010). Nucleophosmin and nucleolin regulate K-Ras signaling. Commun Integr Biol. 3:188-90.
[1226] Wang K, et al. 2010). Export of microRNAs and microRNA-protective protein by mammalian cells. Nucleic Acids Research 38, 7248-7259.
[1227] Hovanessian A G, et al. (2000). The cell-surface-expressed nucleolin is associated with the actin cytoskeleton. Exp Cell Res. 261:312-28.
[1228] Gower H J, et al. (1989). Cloning and characterization of a myoblast cell surface antigen defined by 24.1D5 monoclonal antibody. Development 105:723-31.
[1229] Cai Y, et al. (2015). C1q protein binds to the apoptotic nucleolus and causes C1 protease degradation of nucleolar proteins. J Biol Chem. 290:22570-80.
[1230] Mendoza O, et al. (2016). G-quadruplexes and helicases. Nucleic Acids Res. 44:1989-2006.
[1231] Kirchhausen, T, et al. (2008). Use of dynasore, the small molecule inhibitor of dynamin, in the regulation of endocytosis. Methods Enzymol 438: 77-93.
[1232] Soundararajan, S. et al. (2009). Plasma Membrane Nucleolin Is a Receptor for the Anticancer Aptamer AS1411 in MV4-11 Leukemia Cells. Mol Pharmacol. November; 76(5): 984-991.
[1233] Gupta, S K et al. Gene copy number alteration profile and its clinical correlation in B-cell acute lymphoblastic leukemia. Leuk Lymphoma. 2016 June 24:1-10.
[1234] Zhang, W et al. Expressions of CD96 and CD123 in Bone Marrow Cells of Patients with Myelodysplastic Syndromes. Clin Lab. 2015; 61(10):1429-34.
[1235] Ehninger A et al. Distribution and levels of cell surface expression of CD33 and CD123 in acute myeloid leukemia. Blood Cancer J. 2014 Jun. 13; 4:e218. doi: 10.1038/bcj.2014.39.
[1236] Agger K et al., Jmjd2/Kdm4 demethylases are required for expression of Il3ra and survival of acute myeloid leukemia cells. Genes Dev. 2016 Jun. 1; 30(11): 1278-88.
[1237] Galietta A et al., NPM/ALK binds and phosphorylates the RNA/DNA-binding protein PSF in anaplastic large-cell lymphoma. Blood. 2007 Oct. 1; 110(7):2600-9.
[1238] Vassileva M T et al. SUMO modification of heterogeneous nuclear ribonucleoproteins. Mol Cell Biol. 2004 May; 24(9):3623-32.
[1239] Bates, P et al. (2009). Discovery and development of the G-rich oligonucleotide AS1411 as a novel treatment for cancer. Experimental and Molecular Pathology 86:151-164.

### Example 29: Cell Killing Mediated by Aptamer C10.36

[1240] This work expands on that in Example 28 above. Here we explored cell killing mediated by aptamer C10.36. Aptamer AS 1411 has been shown to decrease viability of a variety of cancer cell types and has undergone phase II clinical trials. See, e.g., Bates et al.; Rosenburg et al. Since C10.36 binds Ramos cells as determined by flow cytometry (see, e.g., FIG. 18A) and pulls down nucleolin complexes in Ramos cells with a ˜10-fold lesser concentration than AS1411, we tested a titration of C10.36 and AS1411 in cellular viability experiments on Ramos, Jurkat and DU145 cell lines.

[1241] To perform these experiments, aptamers were directly added at various concentrations to log phase cells and incubated at 37° C. with CO₂ for up to 6 days. In order to assess cell viability, ATP levels were quantitated with CellTiter-Glo® Luminescent Cell Viability Assay. (Promega, Madison, Wis.). The reagent was added at indicated time points, mixed to allow cell lysis and incubated for 10 mins at room temperature to allow signal stabilization. Luminescence was detected using a Synergy 2 microplate reader (BioTek Instruments, Inc., Winooski, Vt.). Experiments were performed in quadruplicate.

[1242] Representative results are shown in FIGS. 19A-E. FIG. 19A shows viability of Ramos cells after three days incubation of aptamer C10.36 and control C10.36(G24A) at the indicated concentrations of aptamer. Aptamer C10.36 killed over 50% of the cells at 1.0 μM and 10 μM whereas C10.36(G24A) had no effect. FIG. 19B shows similar results with the addition of aptamer AS1411 and control CR026. In these experiments, C10.36 killed Ramos cells with ˜5-fold more efficiency than AS 1411. FIGS. 19C-E show results after 6 days incubation with aptamer in Ramos (FIG. 19C), Jurkat (FIG. 19D), and DU145 cells (FIG. 19E). After 6 days, killing of Ramos cells was similar between aptamers C10.36 and AS1411, whereas only AS1411 had an effect on the viability of Jurkat and DU145 cells. These data are consistent with findings in the Example above that proteins immunoprecipitated with aptamer C10.36 in Ramos cells but not Jurkat or DU145 cells.

[1243] Comparison of aptamer C10.36 with aptamer AS1411 reveals similarities and differences. Both aptamers are able to immunoprecipitate nucleolin-containing complexes. See Tables 29 and 31-32 above; Bates et al. In addition, both form G-quadruplex structures. See Opazo et al.; Bates et al. Functionally, however, aptamer C10.36 kills Ramos cells more rapidly (day 2-day 3) than AS1411 (day 4-6). See, e.g., FIGS. 19B-C. In addition, aptamer C10.36 kills Ramos cells at a lower concentration than AS 1411 (as low as 200 nM). See, e.g., FIGS. 19B-C. However, aptamer C10.36 killed Ramos but not Jurkat or DU145 cells under our conditions, whereas aptamer AS 1411 killed all cells under the same conditions. Compare FIGS. 19C-E. In accordance with the cell killing data, we found that aptamer C10.36 binds to Ramos cells with higher affinity than AS1411. See, e.g., FIGS. 18D-E above and related discussion in the Example above. Finally, recognition of Ramos cells by aptamer C10.36 was impervious to extreme conditions (i.e., 1M NaCl; 4° C.). See Example 28. Without being bound by theory, these data suggest that both aptamers recognize a similar target (e.g., nucleolin comprising protein complexes) but operate via different mechanism.

[1244] References (see also references in Example 28):

[1245] Rosenberg J, et al. (2014). A phase II trial of the nucleolin-targeted DNA aptamer AS 1411 in metastatic refractory renal cell carcinoma. Invest New Drugs 32:178-187.

### Example 30: Cell Growth Inhibition or Killing

[1246] The C10.36 oligonucleotide aptamer of the invention can be used for inhibiting the growth of neoplastic, hyperplastic, malignant or otherwise hyperproliferative cells. See, e.g., Example 29. This Example describes using the aptamer to treat a cancer.

[1247] A pharmaceutical composition comprising a C10.36 oligonucleotide of the invention is administered to a cancer victim in sufficient dosage (e.g., a therapeutically effective amount) to treat the cancer in the victim. As desired, the composition is administered in combination with traditional cancer therapeutics or in addition to immune therapies, e.g., cell-based tumor immunotherapies, or antitumor vaccines.

[1248] Relatedly, the C10.36 aptamer is used to target a liposome, nanoparticle or other chemotherapeutic agent to a hyperproliferative cell. See, e.g., Liao J et al., Cell-specific aptamers and their conjugation with nanomaterials for targeted drug delivery. Expert Opin Drug Deliv. 2015 March; 12(3):493-506; Zhu H et al., Nucleic acid aptamer-mediated drug delivery for targeted cancer therapy. ChemMedChem. 2015 January; 10(1):39-45; Khedri M, et al., Cancer immunotherapy via nucleic acid aptamers. Int Immunopharmacol. 2015 December; 29(2):926-36. A pharmaceutical composition comprising a C10.36 oligonucleotide of the invention on the surface of a liposome is administered to a cancer victim in sufficient dosage (e.g., a therapeutically effective amount) to treat the cancer in the victim. As desired, the composition is administered in combination with traditional cancer therapeutics or in addition to immune therapies, e.g., cell-based tumor immunotherapies, or antitumor vaccines.

[1249] Relatedly, the C10.36 aptamer is used as the targeting domain of a chimeric, multi-part aptamer construct of the invention. A C10.36 region is connected to a segment which also leads to cell killing, such as an immunomodulatory domain. One non-limiting example comprises an anti-C1q oligonucleotide of the invention. See Example 27. A pharmaceutical composition comprising a C10.36 chimeric oligonucleotide is administered to a cancer victim in sufficient dosage (e.g., a therapeutically effective amount) to treat the cancer in the victim. As desired, the composition is administered in combination with traditional cancer therapeutics or in addition to immune therapies, e.g., cell-based tumor immunotherapies, or antitumor vaccines.

### Example 31: Cell Imaging

[1250] This Example describes using a C10.36 oligonucleotide aptamer as an imaging agent.

[1251] The aptamer is combined with imaging agents including without limitation ananomaterial such as a magnetic nanomaterial, quantum dot, gold or radionuclide probe as desired. Sun and Zu. Aptamers and their applications in nanomedicine. Small. 2015 May; 11(20):2352-64; Dougherty C A et al., Applications of aptamers in targeted imaging: state of the art. Curr Top Med Chem. 2015; 15(12): 1138-52. The nanomaterial or other imaging agent is directly conjugated to the aptamer or encapsulated in a C10.36 targeted liposome or other nanoparticle. The construct can be configured to recognize cell surface splicing complexes or cell surface ribonucleoprotein complexes and not internalize, thereby preferentially recognizing cancer cells. The aptamer targeted construct is administered to a patient and imaged to visualize the location of desired cells such as cells comprising cell surface splicing complexes or cell surface ribonucleoprotein complexes.

### Example 32: C10.36 Immunoassay and Isolation

[1252] This Example illustrates immunoassays using a C10.36 oligonucleotide. A nucleic acid construct is synthesized comprising oligonucleotide region corresponding to C10.36 (i.e., SEQ ID NO. 4357). The oligonucleotide construct may comprise a biotin modification to facilitate specific recognition by a desired moiety attached to streptavidin. Alternate modifications and sequence variants that retain binding ability (e.g., do not disrupt the G quadruplex structure) may be used as desired. See, e.g., SEQ ID NOs. 4372-4407.

[1253] A labeled C10.36 aptamer is constructed. The C10.36 construct is contacted with fluorescently labeled streptavidin such as a streptavidin-Alexa Fluor® 488 conjugate from Thermo Fisher Scientific, Catalog number: S11223. The C10.36 can be directly conjugated to Alexa Fluor® 488, using labeled nanoparticles, or any other useful mechanism. This creates a fluorescently labeled C10.36 construct which is used to detect targets in various immunoassay formats. In one scenario, a biological sample known or suspected to contain a target of C10.36 (see, e.g., Example 28) is contacted with an ELISA plate. The plate is washed and contacted with the fluorescently labeled C10.36 construct. The fluorescent signal is read from the wells in the plate, thereby providing an indication of the presence or amount of target in the biological sample. In another scenario, a biological sample is directly contacted with the fluorescently labeled C10.36 construct. The contacted sample is subjected to flow cytometry to detect fluorescent particles of the size of cells, thereby providing an indication of the presence or amount of cells having surface displayed target in the biological sample. Alternate labels such as disclosed herein or known in the art can be used in such formats.

[1254] Various modifications of the above scenarios are performed. For example, the C10.36 aptamer is directly labeled with Alexa Fluor during the oligonucleotide synthesis process.

[1255] An immobilized C10.36 aptamer is constructed. In one scenario, the C10.36 construct is contacted with streptavidin conjugated beads. The beads are contacted with a biological sample known or suspected to contain a target of C10.36 (see, e.g., Example 28). The beads are precipitated (e.g., by centrifugation or magnetism) and washed. Proteins that precipitate with the beads are analyzed, thereby providing an indication of the presence or amount of target in the biological sample. In another scenario, the C10.36 aptamer construct is contacted with streptavidin agarose resin, e.g., Pierce™ Streptavidin Agarose, Thermo Fisher Scientific Catalog number: 20347 or Pierce™ High Capacity Streptavidin Agarose Thermo Fisher Scientific Catalog number: 20357. The resins are placed in a spin column or chromatography column, respectively. The aptamer is contacted with the resin where it is bound by the streptavidin. A biological sample known or suspected to comprise a target of C10.36 is allowed to pass through the resin. Targets (proteins, complexes, cells, etc) in the biological sample are retained by the aptamer within the resin and are then analyzed after elution. In either scenario, if desired, the C10.36 aptamer is contacted with the biological sample in solution and then the sample is contacted with the beads or resin. This step allows the C10.36 aptamer and target to bind freely in solution prior to aptamer immobilization.

[1256] Various modifications of the above scenarios are performed. For example, the C10.36 aptamer is directly conjugated to a bead or other desired surface.

[1257] One of skill will appreciate that the C10.36 aptamer construct can be used in any desired scenario where antibodies are conventionally used. See, e.g., Toh et al., Aptamers as a replacement for antibodies in enzyme-linked immunosorbent assay. Biosens Bioelectron. 2015 Feb. 15; 64:392-403. doi: 10.1016/j.bios.2014.09.026. Epub 2014 Sep. 16; Chen and Yang, Replacing antibodies with aptamers in lateral flow immunoassay. Biosens Bioelectron. 2015 Sep. 15; 71:230-42. doi: 10.1016/j.bios.2015.04.041. Epub 2015 Apr. 14; Guthrie et al, Assays for cytokines using aptamers. Methods. 2006 April; 38(4):324-30; Romig et al., Aptamer affinity chromatography: combinatorial chemistry applied to protein purification. J Chromatogr B Biomed Sci Appl. 1999 Aug. 20; 731(2):275-84.

### Example 33: Target Detection in Bodily Fluids

[1258] This Example describes using a C10.36 oligonucleotide aptamer to detect cancer cells in bodily fluids. A bodily fluid such as blood or a derivative thereof, including without limitation sera or plasma, is obtained from a subject. An assay such as described in Example 32 is used to detect C10.36 bound to cells in the bodily fluid. As desired, such detection may assist in the diagnosis, prognosis or theranosis of a disease or disorder. See, e.g., Examples 8-9 herein.

### Example 34: Differential Cell Killing Mediated by Aptamer C10.36

[1259] We showed in Example 29 above that aptamer C10.36 killed Ramos but not Jurkat or DU145 cells under our conditions, whereas aptamer AS 1411 killed all cells under the same conditions. Compare FIGS. 19C-E. In this Example, these experiments were repeated with additional cells lines.

[1260] Aptamers were added directly to log phase cultures and viability was assessed after 72 hrs with CellTiter-Glo®. The IC₅₀ for Ramos cells was determined to be ˜238 nM. See FIG. 20A. Ramos 2G6.4C10, a derivative cell line from the parental Ramos cell line selected by repetitive cloning with selection for low constitutive expression of CD23 and maximum stimulation of CD23 by expression of IL-4 had an IC₅₀ ˜328 nM. See FIG. 20B. In addition, a Diffuse Histiocytic Lymphoma line, SU-DHL-1, was the most sensitive to treatment with C10.36 with an IC₅₀ of ˜100 nM. See FIG. 20C. In addition to Jurkat (FIG. 20D), SKW6.4, a cell line derived from normal B-cell lymphoblast transformed with EBV was not sensitive to treatment with C10.36 (FIG. 20E). Nor was a CLL derived cell line, MEC-1 (FIG. 20F), the Burkitt's Lymphoma cell line, Raji (FIG. 20G), or Daudi cells, a human Burkitt's lymphoma cell line (FIG. 20H).

[1261] Negative control aptamer G24A treatment did not result in a concentration dependent decrease in viability in any of the cell lines.

[1262] As in Example 29, these data confirm that cell killing by aptamer C10.36 is specific to certain cell types.

### Example 35: Cellular Targets of Aptamer C10.36

[1263] In Example 28 above, we reported a number of proteins that co-precipitated with aptamer C10.36 in various conditions and cell lines. Here we expand these results with additional cell lines as in the Example above.

[1264] As above, we performed affinity purification (aka pull downs) with C10.36 or the control aptamer C10.36(G24A) across the 7 cell lines. These data revealed that the most amount of protein was recovered in Ramos, Ramos2G6.4C10, SU-DHL-1, and MEC-1 cells. See FIGS. 21A-B. In FIG. 21A, the aptamer used for the precipitations is indicated in the Gel Layout table. In FIG. 21B, the aptamer used for the precipitations is indicated to the right of the gel images. We digested purified bands from the gels followed by LC-MS/MS. Proteins identified in the experiments are listed in Table 41. Tables 42-43 shows the number of peptide spectral matches (PSMs) identified in Ramos, SUDHL1, Raji, and Jurkat cells lines after duplicate pull downs with aptamer C10.36 or C10.36(G24A), respectively. Table 44 shows the peptides and number of PSMs identified in the indicated cells lines after pull downs with aptamer C10.36 or C10.36(G24A), as indicated.

TABLE 41
Proteins pulled down in Ramos, SUDHL1, Raji, and Jurkat cells

| | Accession | Molecular | |
|---|---|---|---|
| Identified Proteins | Number | Weight | |
| Cluster of Actin, cytoplasmic 1 (P60709) | P60709 | 42 | kDa |
| Nucleolin | P19338 | 77 | kDa |
| Isoform C1 of Heterogeneous nuclear ribonucleoproteins C1/C2 | P07910 | 32 | kDa |
| splicing factor, proline- and glutamine-rich | P23246 | 76 | kDa |
| histone H4 | P62805 | 11 | kDa |
| Histone H1.5 | P16401 | 23 | kDa |
| NHP2-like protein 1 | P55769 | 14 | kDa |
| heterogeneous nuclear ribonucleoproteins A2/B1 | P22626 | 37 | kDa |
| rRNA 2′-O-methyltransferase fibrillarin | P22087 | 34 | kDa |
| ATP synthase subunit alpha, mitochondrial | P25705 | 60 | kDa |
| Nucleolar RNA helicase 2/DDX21 | Q9NR30 | 87 | kDa |
| 60S ribosomal protein L30 | P62888 | 13 | kDa |
| 60S ribosomal protein L26 | P61254 | 17 | kDa |
| annexin A1 | P04083 | 39 | kDa |
| Heat shock protein beta-1 | P04792 | 23 | kDa |
| Poly [ADP-ribose] polymerase 1 | P09874 | 113 | kDa |
| Protein S100-A9 | P06702 | 13 | kDa |
| Histone H1.2 | P16403 | 21 | kDa |
| Cornulin | Q9UBG3 | 54 | kDa |
| Small proline-rich protein 3 | Q9UBC9 | 18 | kDa |
| 60S ribosomal protein L22 | P35268 | 15 | kDa |
| Heterogeneous nuclear ribonucleoprotein A1 | P09651 | 39 | kDa |
| Cystatin-B | P04080 | 11 | kDa |
| periplakin | O60437 | 205 | kDa |
| Histone H2B type 1-M | Q99879 | 14 | kDa |
| Histone H2A type 2-A | Q6FI13 | 14 | kDa |
| 60S ribosomal protein L27 | P61353 | 16 | kDa |
| Cluster of Myosin-9 (P35579-1) | P35579 | 227 | kDa |
| Cellular nucleic acid-binding protein | P62633 | 19 | kDa |
| Heterogeneous nuclear ribonucleoprotein U | Q00839 | 91 | kDa |
| RNA-binding protein 14 | Q96PK6 | 69 | kDa |
| Non-POU domain-containing octamer-binding protein/NONO | Q15233 | 54 | kDa |
| H/ACA ribonucleoprotein complex subunit 4 | O60832 | 58 | kDa |
| Nucleolar transcription factor 1 | P17480 | 89 | kDa |
| Histone H1x | Q92522 | 22 | kDa |
| Histone H2B type 1-B | P33778 | 14 | kDa |
| Histone H1.3 | P16402 | 22 | kDa |
| Histone H1.4 | P10412 | 22 | kDa |
| histone H3.2 | Q71DI3 | 15 | kDa |
| Histone H2A.Z | P0C0S5 | 14 | kDa |
| Heat shock protein HSP 90-beta | P08238 | 83 | kDa |
| Apolipoprotein A-I | P02647 | 31 | kDa |
| 60 kDa heat shock protein, mitochondrial | P10809 | 61 | kDa |
| ATP synthase subunit beta, mitochondrial | P06576 | 57 | kDa |
| Ubiquitin-60S ribosomal protein L40 | P62987 | 15 | kDa |
| 40S ribosomal protein S3a | P61247 | 30 | kDa |
| 60S ribosomal protein L7a | P62424 | 30 | kDa |
| Ig alpha-1 chain C region | P01876 | 38 | kDa |
| 60S acidic ribosomal protein P2 | P05387 | 12 | kDa |
| Stomatin-like protein 2, mitochondrial | Q9UJZ1 | 39 | kDa |
| Fibrinogen alpha chain | P02671 | 95 | kDa |
| 60S ribosomal protein L6 | Q02878 | 33 | kDa |
| RuvB-like 1 | Q9Y265 | 50 | kDa |
| 26S proteasome non-ATPase regulatory subunit 2 | Q13200 | 100 | kDa |
| Small nuclear ribonucleoprotein Sm D1 | P62314 | 13 | kDa |
| Isoform 2 of 60S acidic ribosomal protein P0 | P05388 | 27 | kDa |
| Complement C3 | P01024 | 187 | kDa |
| small nuclear ribonucleoprotein sm d3 | P62318 | 14 | kDa |
| Isoform 2 of Elongation factor 1-delta | P29692 | 71 | kDa |
| 60S ribosomal protein L21 | P46778 | 19 | kDa |
| 60S ribosomal protein L35a | P18077 | 13 | kDa |
| 26S proteasome non-ATPase regulatory subunit 7 | P51665 | 37 | kDa |
| T-complex protein 1 subunit zeta | P40227 | 58 | kDa |
| Protein disulfide-isomerase | P07237 | 57 | kDa |
| Isoform 2 of Heterogeneous nuclear ribonucleoprotein K | P61978 | 51 | kDa |
| Heterogeneous nuclear ribonucleoprotein H3 | P31942 | 37 | kDa |
| 60S ribosomal protein L12 | P30050 | 18 | kDa |
| RNA-binding motif protein, X chromosome | P38159 | 42 | kDa |
| ADP/ATP translocase 2 | P05141 | 33 | kDa |
| Ig mu chain C region | P01871 | 49 | kDa |
| 40S ribosomal protein S8 | P62241 | 24 | kDa |
| Elongation factor 1-beta | P24534 | 25 | kDa |
| Heterogeneous nuclear ribonucleoprotein H | P31943 | 49 | kDa |
| 40S ribosomal protein S17 | P08708 | 16 | kDa |
| 60S ribosomal protein L37a | P61513 | 10 | kDa |
| Clusterin | P10909 | 52 | kDa |
| protein Shroom3 | Q8TF72 | 217 | kDa |
| Histone H2B type 1-K | O60814 | 14 | kDa |
| 60S ribosomal protein L13 | P26373 | 24 | kDa |
| Signal recognition particle 14 kDa protein | P37108 | 15 | kDa |
| ATP synthase subunit O, mitochondrial | P48047 | 23 | kDa |
| Rho GDP-dissociation inhibitor 2 | P52566 | 23 | kDa |
| probable ATP-dependent RNA helicase DDX5 | P17844 | 69 | kDa |
| Myosin light chain 6B | P14649 | 23 | kDa |
| Pyruvate kinase PKM | P14618 | 58 | kDa |
| RuvB-like 2 | Q9Y230 | 51 | kDa |
| GTP-binding nuclear protein RAN | P62826 | 24 | kDa |
| nucleolar and coiled-body phosphoprotein 1 | Q14978 | 74 | kDa |
| peptidyl-prolyl cis-trans isomerase A | P62937 | 18 | kDa |
| 40S ribosomal protein S11 | P62280 | 18 | kDa |
| Ig lambda-2 chain C regions | P0CG05 | 11 | kDa |
| 60S ribosomal protein L23 | P62829 | 15 | kDa |
| Serine/arginine-rich splicing factor 3 | P84103 | 19 | kDa |
| citrate synthase, mitochondrial | O75390 | 52 | kDa |

TABLE 42
Peptides pulled down in Ramos, SUDHL1, Raji, and Jurkat cells with C10.36

| Accession | Ramos | Ramos | SU-DHL-1 | SU-DHL-1 | Jurkat | Jurkat | Raji | Raji |
|---|---|---|---|---|---|---|---|---|
| Number | C10.36 | C10.36 | C10.36 | C10.36 | C10.36 | C10.36 | C10.36 | C10.36 |
| P60709 | 18 | 17 | 18 | 16 | 3 | 0 | 16 | 11 |
| P19338 | 16 | 8 | 15 | 14 | 13 | 6 | 9 | 5 |
| P07910 | 15 | 15 | 14 | 10 | 1 | 2 | 7 | 6 |
| P23246 | 3 | 6 | 0 | 2 | 0 | 4 | 5 | 4 |
| P62805 | 60 | 33 | 24 | 38 | 1 | 3 | 4 | 2 |
| P16401 | 39 | 32 | 10 | 24 | 4 | 0 | 1 | 2 |
| P55769 | 7 | 5 | 0 | 3 | 1 | 0 | 1 | 2 |
| P22626 | 6 | 3 | 0 | 2 | 0 | 0 | 1 | 0 |
| P22087 | 4 | 7 | 0 | 7 | 2 | 0 | 0 | 1 |
| P25705 | 18 | 13 | 10 | 9 | 0 | 0 | 0 | 0 |
| Q9NR30 | 8 | 4 | 0 | 1 | 0 | 0 | 0 | 0 |
| P62888 | 5 | 3 | 1 | 2 | 0 | 0 | 0 | 0 |
| P61254 | 0 | 4 | 0 | 4 | 0 | 0 | 0 | 0 |
| P04083 | 0 | 0 | 0 | 3 | 0 | 0 | 12 | 0 |
| P04792 | 4 | 3 | 0 | 3 | 0 | 0 | 7 | 0 |
| P09874 | 1 | 11 | 0 | 0 | 0 | 0 | 5 | 7 |
| P06702 | 0 | 0 | 0 | 0 | 0 | 0 | 5 | 0 |
| P16403 | 51 | 50 | 14 | 26 | 2 | 3 | 3 | 3 |
| Q9UBG3 | 0 | 0 | 0 | 0 | 0 | 0 | 3 | 0 |
| Q9UBC9 | 0 | 0 | 0 | 0 | 0 | 0 | 3 | 0 |
| P35268 | 2 | 4 | 0 | 3 | 0 | 0 | 2 | 1 |
| P09651 | 5 | 2 | 0 | 0 | 0 | 0 | 2 | 0 |
| P04080 | 0 | 0 | 0 | 0 | 0 | 0 | 2 | 0 |
| O60437 | 0 | 0 | 0 | 0 | 0 | 0 | 2 | 0 |
| Q99879 | 57 | 43 | 34 | 47 | 1 | 1 | 1 | 1 |
| Q6FI13 | 22 | 26 | 25 | 29 | 3 | 0 | 1 | 1 |
| P61353 | 0 | 2 | 0 | 3 | 0 | 0 | 1 | 0 |
| P35579 | 24 | 23 | 0 | 2 | 0 | 0 | 1 | 0 |
| P62633 | 0 | 2 | 0 | 2 | 0 | 0 | 1 | 0 |
| Q00839 | 2 | 4 | 4 | 1 | 1 | 0 | 1 | 0 |
| Q96PK6 | 0 | 3 | 0 | 0 | 0 | 0 | 1 | 0 |
| Q15233 | 0 | 7 | 0 | 1 | 0 | 0 | 0 | 3 |
| O60832 | 0 | 3 | 0 | 0 | 0 | 0 | 0 | 2 |
| P17480 | 0 | 2 | 1 | 0 | 0 | 0 | 0 | 2 |
| Q92522 | 2 | 1 | 0 | 3 | 0 | 0 | 0 | 0 |
| P33778 | 54 | 41 | 34 | 46 | 0 | 0 | 0 | 0 |
| P16402 | 42 | 44 | 15 | 25 | 0 | 0 | 0 | 0 |
| P10412 | 48 | 49 | 15 | 25 | 0 | 0 | 0 | 0 |
| Q71D13 | 17 | 21 | 14 | 20 | 2 | 0 | 0 | 0 |
| P0C0S5 | 15 | 0 | 0 | 16 | 0 | 0 | 0 | 0 |
| P08238 | 0 | 8 | 18 | 16 | 0 | 0 | 0 | 0 |
| P02647 | 0 | 4 | 0 | 12 | 0 | 0 | 0 | 0 |
| P10809 | 13 | 15 | 15 | 9 | 0 | 0 | 0 | 0 |
| P06576 | 18 | 14 | 5 | 8 | 0 | 0 | 0 | 0 |
| P62987 | 12 | 6 | 3 | 5 | 0 | 0 | 0 | 0 |
| P61247 | 8 | 3 | 0 | 5 | 0 | 0 | 0 | 0 |
| P62424 | 7 | 5 | 0 | 5 | 0 | 0 | 0 | 0 |
| P01876 | 0 | 3 | 0 | 5 | 0 | 0 | 0 | 0 |
| P05387 | 0 | 0 | 5 | 5 | 0 | 0 | 0 | 0 |
| Q9UJZ1 | 0 | 0 | 0 | 4 | 0 | 0 | 0 | 0 |
| P02671 | 0 | 0 | 0 | 4 | 0 | 0 | 0 | 0 |
| Q02878 | 6 | 5 | 5 | 3 | 0 | 0 | 0 | 0 |
| Q9Y265 | 6 | 3 | 0 | 3 | 0 | 0 | 0 | 0 |
| Q13200 | 4 | 4 | 0 | 3 | 0 | 0 | 0 | 0 |
| P62314 | 0 | 2 | 3 | 3 | 0 | 0 | 0 | 0 |
| P05388 | 0 | 2 | 0 | 3 | 0 | 0 | 0 | 0 |
| P01024 | 0 | 0 | 0 | 3 | 0 | 0 | 0 | 0 |
| P62318 | 0 | 0 | 0 | 3 | 0 | 0 | 0 | 0 |
| P29692 | 4 | 2 | 3 | 2 | 0 | 0 | 0 | 0 |
| P46778 | 3 | 2 | 0 | 2 | 0 | 0 | 0 | 0 |
| P18077 | 0 | 2 | 0 | 2 | 0 | 0 | 0 | 0 |
| P51665 | 0 | 1 | 0 | 2 | 0 | 0 | 0 | 0 |
| P40227 | 0 | 0 | 0 | 2 | 0 | 0 | 0 | 0 |
| P07237 | 0 | 0 | 0 | 2 | 0 | 0 | 0 | 0 |
| P61978 | 4 | 4 | 0 | 1 | 0 | 0 | 0 | 0 |
| P31942 | 1 | 2 | 3 | 1 | 0 | 0 | 0 | 0 |
| P30050 | 0 | 4 | 0 | 1 | 0 | 0 | 0 | 0 |
| P38159 | 0 | 3 | 3 | 1 | 0 | 0 | 0 | 0 |
| P05141 | 0 | 3 | 1 | 1 | 0 | 0 | 0 | 0 |
| P01871 | 0 | 3 | 0 | 1 | 0 | 0 | 0 | 0 |
| P62241 | 0 | 2 | 1 | 1 | 0 | 0 | 0 | 0 |
| P24534 | 0 | 2 | 0 | 1 | 0 | 0 | 0 | 0 |
| P31943 | 0 | 2 | 0 | 1 | 0 | 0 | 0 | 0 |
| P08708 | 0 | 1 | 0 | 1 | 0 | 0 | 0 | 0 |
| P61513 | 0 | 0 | 2 | 1 | 0 | 0 | 0 | 0 |
| P10909 | 0 | 0 | 0 | 1 | 0 | 0 | 0 | 0 |
| Q8TF72 | 0 | 0 | 0 | 0 | 2 | 0 | 0 | 0 |
| O60814 | 56 | 0 | 0 | 0 | 0 | 0 | 0 | 0 |
| P26373 | 5 | 2 | 0 | 0 | 0 | 0 | 0 | 0 |
| P37108 | 4 | 4 | 2 | 0 | 0 | 0 | 0 | 0 |
| P48047 | 4 | 1 | 0 | 0 | 0 | 0 | 0 | 0 |
| P52566 | 2 | 2 | 0 | 0 | 0 | 0 | 0 | 0 |
| P17844 | 2 | 0 | 0 | 0 | 0 | 0 | 0 | 0 |
| P14649 | 1 | 3 | 0 | 0 | 0 | 0 | 0 | 0 |
| P14618 | 1 | 1 | 0 | 0 | 0 | 0 | 0 | 0 |
| Q9Y230 | 0 | 5 | 0 | 0 | 0 | 0 | 0 | 0 |
| P62826 | 0 | 5 | 0 | 0 | 0 | 0 | 0 | 0 |
| Q14978 | 0 | 3 | 0 | 0 | 0 | 0 | 0 | 0 |
| P62937 | 0 | 3 | 0 | 0 | 0 | 0 | 0 | 0 |
| P62280 | 0 | 2 | 0 | 0 | 0 | 0 | 0 | 0 |
| P0CG05 | 0 | 2 | 0 | 0 | 0 | 0 | 0 | 0 |
| P62829 | 0 | 2 | 0 | 0 | 0 | 0 | 0 | 0 |
| P84103 | 0 | 2 | 0 | 0 | 0 | 0 | 0 | 0 |
| O75390 | 0 | 1 | 0 | 0 | 0 | 0 | 0 | 0 |

TABLE 43
Peptides pulled down in Ramos, SUDHL1, Raji and Jurkat cells with C10.36(G24)

| Accession | Ramos | Ramos | SU-DHL-1 | SU-DHL-1 | Jurkat | Jurkat | Raji | Raji |
|---|---|---|---|---|---|---|---|---|
| Number | G24A | G24A | G24A | G24A | G24A | G24A | G24A | G24A |
| P60709 | 2 | 2 | 12 | 9 | 1 | 0 | 2 | 0 |
| P19338 | 0 | 0 | 4 | 8 | 1 | 5 | 0 | 1 |
| P07910 | 0 | 0 | 0 | 1 | 0 | 0 | 0 | 0 |
| P23246 | 0 | 0 | 0 | 0 | 0 | 0 | 0 | 2 |
| P62805 | 16 | 13 | 27 | 23 | 1 | 3 | 0 | 0 |
| P16401 | 9 | 11 | 15 | 13 | 2 | 3 | 0 | 1 |
| P55769 | 0 | 0 | 0 | 1 | 0 | 0 | 0 | 0 |
| P22626 | 1 | 0 | 0 | 0 | 0 | 0 | 0 | 0 |
| P22087 | 0 | 0 | 0 | 0 | 0 | 0 | 0 | 0 |
| P25705 | 5 | 0 | 0 | 6 | 0 | 0 | 0 | 0 |
| Q9NR30 | 0 | 0 | 0 | 0 | 0 | 0 | 0 | 0 |
| P62888 | 0 | 0 | 0 | 2 | 0 | 0 | 0 | 0 |
| P61254 | 0 | 0 | 0 | 0 | 0 | 0 | 0 | 0 |
| P04083 | 0 | 0 | 0 | 1 | 0 | 0 | 0 | 0 |
| P04792 | 0 | 0 | 0 | 0 | 0 | 0 | 0 | 0 |
| P09874 | 0 | 0 | 0 | 0 | 0 | 0 | 0 | 0 |
| P06702 | 0 | 0 | 0 | 0 | 0 | 0 | 0 | 0 |
| P16403 | 18 | 20 | 16 | 17 | 3 | 4 | 0 | 1 |
| Q9UBG3 | 0 | 0 | 0 | 0 | 0 | 0 | 0 | 0 |
| Q9UBC9 | 0 | 0 | 0 | 0 | 0 | 0 | 0 | 0 |
| P35268 | 0 | 0 | 0 | 1 | 0 | 0 | 0 | 0 |
| P09651 | 0 | 0 | 0 | 0 | 0 | 0 | 0 | 0 |
| P04080 | 0 | 0 | 0 | 0 | 0 | 0 | 0 | 0 |
| O60437 | 0 | 0 | 0 | 0 | 0 | 0 | 0 | 0 |
| Q99879 | 16 | 14 | 29 | 22 | 0 | 3 | 0 | 0 |
| Q6FI13 | 16 | 12 | 26 | 15 | 0 | 0 | 0 | 0 |
| P61353 | 0 | 0 | 1 | 0 | 0 | 0 | 0 | 0 |
| P35579 | 1 | 0 | 0 | 0 | 0 | 0 | 0 | 0 |
| P62633 | 0 | 0 | 0 | 0 | 0 | 0 | 0 | 0 |
| Q00839 | 0 | 0 | 0 | 0 | 0 | 0 | 0 | 0 |
| Q96PK6 | 0 | 0 | 0 | 0 | 0 | 0 | 0 | 0 |
| Q15233 | 0 | 0 | 0 | 0 | 0 | 0 | 0 | 0 |
| O60832 | 0 | 0 | 0 | 0 | 0 | 0 | 0 | 0 |
| P17480 | 0 | 0 | 0 | 0 | 0 | 0 | 0 | 0 |
| Q92522 | 0 | 0 | 2 | 0 | 0 | 0 | 0 | 0 |
| P33778 | 15 | 0 | 29 | 20 | 0 | 0 | 0 | 0 |
| P16402 | 0 | 0 | 17 | 16 | 0 | 0 | 0 | 0 |
| P10412 | 15 | 19 | 17 | 15 | 0 | 0 | 0 | 0 |
| Q71DI3 | 6 | 7 | 14 | 9 | 0 | 0 | 0 | 0 |
| P0C0S5 | 0 | 0 | 10 | 0 | 0 | 0 | 0 | 0 |
| P08238 | 0 | 0 | 9 | 6 | 0 | 0 | 0 | 0 |
| P02647 | 0 | 0 | 0 | 0 | 0 | 0 | 0 | 0 |
| P10809 | 4 | 0 | 0 | 9 | 0 | 0 | 0 | 0 |
| P06576 | 2 | 0 | 0 | 3 | 0 | 0 | 0 | 0 |
| P62987 | 0 | 0 | 2 | 0 | 0 | 0 | 0 | 0 |
| P61247 | 0 | 0 | 0 | 0 | 0 | 0 | 0 | 0 |
| P62424 | 0 | 0 | 0 | 0 | 0 | 0 | 0 | 0 |
| P01876 | 0 | 0 | 0 | 0 | 0 | 0 | 0 | 0 |
| P05387 | 0 | 0 | 0 | 1 | 0 | 0 | 0 | 0 |
| Q9UJZ1 | 0 | 0 | 0 | 0 | 0 | 0 | 0 | 0 |
| P02671 | 0 | 0 | 0 | 0 | 0 | 0 | 0 | 0 |
| Q02878 | 0 | 1 | 0 | 2 | 0 | 0 | 0 | 0 |
| Q9Y265 | 0 | 0 | 0 | 0 | 0 | 0 | 0 | 0 |
| Q13200 | 0 | 0 | 0 | 0 | 0 | 0 | 0 | 0 |
| P62314 | 0 | 0 | 1 | 1 | 0 | 0 | 0 | 0 |
| P05388 | 0 | 0 | 0 | 1 | 0 | 0 | 0 | 0 |
| P01024 | 0 | 0 | 0 | 0 | 0 | 0 | 0 | 0 |
| P62318 | 0 | 0 | 0 | 1 | 0 | 0 | 0 | 0 |
| P29692 | 0 | 0 | 0 | 1 | 0 | 0 | 0 | 0 |
| P46778 | 0 | 0 | 0 | 0 | 0 | 0 | 0 | 0 |
| P18077 | 0 | 0 | 0 | 0 | 0 | 0 | 0 | 0 |
| P51665 | 0 | 0 | 0 | 0 | 0 | 0 | 0 | 0 |
| P40227 | 0 | 0 | 0 | 0 | 0 | 0 | 0 | 0 |
| P07237 | 0 | 0 | 0 | 0 | 0 | 0 | 0 | 0 |
| P61978 | 0 | 0 | 0 | 0 | 0 | 0 | 0 | 0 |
| P31942 | 0 | 0 | 0 | 0 | 0 | 0 | 0 | 0 |
| P30050 | 0 | 0 | 0 | 0 | 0 | 0 | 0 | 0 |
| P38159 | 0 | 0 | 0 | 0 | 0 | 0 | 0 | 0 |
| P05141 | 0 | 0 | 0 | 0 | 0 | 0 | 0 | 0 |
| P01871 | 0 | 0 | 0 | 0 | 0 | 0 | 0 | 0 |
| P62241 | 0 | 0 | 0 | 0 | 0 | 0 | 0 | 0 |
| P24534 | 0 | 0 | 0 | 0 | 0 | 0 | 0 | 0 |
| P31943 | 0 | 0 | 0 | 0 | 0 | 0 | 0 | 0 |
| P08708 | 0 | 0 | 0 | 0 | 0 | 0 | 0 | 0 |
| P61513 | 0 | 0 | 0 | 0 | 0 | 0 | 0 | 0 |
| P10909 | 0 | 0 | 0 | 0 | 0 | 0 | 0 | 0 |
| Q8TF72 | 0 | 0 | 0 | 0 | 0 | 0 | 0 | 0 |
| O60814 | 0 | 0 | 0 | 0 | 0 | 0 | 0 | 0 |
| P26373 | 0 | 0 | 0 | 0 | 0 | 0 | 0 | 0 |
| P37108 | 0 | 0 | 0 | 0 | 0 | 0 | 0 | 0 |
| P48047 | 0 | 0 | 0 | 0 | 0 | 0 | 0 | 0 |
| P52566 | 0 | 0 | 0 | 0 | 0 | 0 | 0 | 0 |
| P17844 | 0 | 0 | 0 | 0 | 0 | 0 | 0 | 0 |
| P14649 | 0 | 0 | 0 | 0 | 0 | 0 | 0 | 0 |
| P14618 | 0 | 0 | 0 | 0 | 0 | 0 | 0 | 0 |
| Q9Y230 | 0 | 0 | 0 | 1 | 0 | 0 | 0 | 0 |
| P62826 | 0 | 0 | 0 | 0 | 0 | 0 | 0 | 0 |
| Q14978 | 0 | 0 | 0 | 0 | 0 | 0 | 0 | 0 |
| P62937 | 0 | 0 | 0 | 0 | 0 | 0 | 0 | 0 |
| P62280 | 0 | 0 | 0 | 0 | 0 | 0 | 0 | 0 |
| P0CG05 | 0 | 0 | 0 | 0 | 0 | 0 | 0 | 0 |
| P62829 | 0 | 0 | 0 | 0 | 0 | 0 | 0 | 0 |
| P84103 | 0 | 0 | 0 | 0 | 0 | 0 | 0 | 0 |
| O75390 | 0 | 0 | 0 | 0 | 0 | 0 | 0 | 0 |

TABLE 44
Peptides pulled down in Ramos 2G6.4C10, MEC-1,
and SKW6.4 cells with C10.36 and C10.36(G24)

| | |
|---|---|
| Aptamer Pull-down | Aptamer Pull-down |
| with C10.36 | with C10.36(G24A) |

| | Ramos | | | Ramos | | |
|---|---|---|---|---|---|---|
| Accession Number | 2G6.4C10 | MEC-1 | SKW6.4 | 2G6.4C10 | MEC-1 | SKW6.4 |
| P37108 | 0 | 1 | 0 | 0 | 0 | 0 |
| Q9NR30 | 1 | 0 | 0 | 0 | 0 | 0 |
| P62081 | 1 | 0 | 0 | 0 | 0 | 0 |
| P61254 | 1 | 0 | 0 | 0 | 0 | 0 |
| P62829 | 2 | 0 | 0 | 0 | 0 | 0 |
| P06748 | 2 | 0 | 0 | 0 | 0 | 0 |
| Q04837 | 2 | 0 | 0 | 0 | 0 | 0 |
| P22626 | 2 | 0 | 0 | 0 | 0 | 0 |
| P55769 | 2 | 0 | 0 | 0 | 0 | 0 |
| P04406 | 2 | 0 | 0 | 0 | 0 | 0 |
| P0CG47 | 2 | 0 | 0 | 0 | 0 | 0 |
| P62888 | 2 | 0 | 0 | 0 | 0 | 0 |
| P09874 | 3 | 0 | 0 | 0 | 0 | 0 |
| P23246 | 3 | 3 | 0 | 0 | 0 | 0 |
| P25705 | 3 | 0 | 0 | 0 | 0 | 0 |
| P84243 | 4 | 0 | 0 | 0 | 0 | 0 |
| P22087 | 4 | 0 | 0 | 0 | 0 | 0 |
| P60709 | 5 | 3 | 1 | 0 | 0 | 0 |
| P07910 | 5 | 5 | 2 | 0 | 0 | 0 |
| P19338 | 7 | 3 | 0 | 0 | 0 | 2 |
| P0C0S8 | 8 | 2 | 1 | 0 | 0 | 0 |
| O60814 | 8 | 1 | 0 | 0 | 0 | 0 |
| P62805 | 11 | 3 | 0 | 0 | 2 | 0 |
| P16401 | 13 | 0 | 0 | 0 | 0 | 2 |
| P16403 | 18 | 2 | 0 | 0 | 0 | 2 |

[1265] The above experiments identified 13 proteins in common between Ramos, Ramos 2G6.4C10, and SU-DHL-1 cells that are sensitive to treatment with C10.36, which are the first 13 proteins listed in Table 41 (i.e., Cluster of Actin, cytoplasmic 1; Nucleolin; Isoform C1 of Heterogeneous nuclear ribonucleoproteins C1/C2; splicing factor, proline- and glutamine-rich; histone H4; Histone H1.5; NHP2-like protein 1; heterogeneous nuclear ribonucleoproteins A2/B1; rRNA 2′-O-methyltransferase fibrillarin; ATP synthase subunit alpha, mitochondrial; Nucleolar RNA helicase 2/DDX21; 60S ribosomal protein L30; 60S ribosomal protein L26). There were an additional 45 that overlap between Ramos and SU-DHL-1 and three that overlap between Ramos and Ramos2G6.4C10. See Table 42. The majority of the identified proteins are ribonucleoproteins involved in chromatin rearrangements and splicing. Only three proteins were detected in SKW6.4 control EBV transformed B-cells (accessions P07910, P60709 and P0C0S8). And five proteins were detected between Ramos, MEC-1, Raji and Jurkat that had no loss of viability (accessions P07910, P60709, P19338, P62805 and P23246).

[1266] We next found that specific binding of C10.36 assessed by flow cytometry correlates well with the amount of protein recovered by affinity purification. See Table 45. These experiments indicated that C10.36 binding to cells as assessed by flow cytometry was consistent with the amount of protein that is detected from the affinity purification experiments above. In addition, MEC-1 binding is high but does not correlate with loss of viability.

TABLE 45
Binding of aptamer C10.36 to different
cell lines assessed by flow cytometry

| | PE MESF | | | |
|---|---|---|---|---|
| | 400 nM aptamer | | 200 nM aptamer | |
| | C10.36- | C10.36(G24A)- | C10.36- | C10.36(G24A)- |
| | biotin + | biotin + | biotin + | biotin + |
| Cell Line | SAPE | SAPE | SAPE | SAPE |
| Ramos | 356,324 | 1,492 | 246,575 | 1,324 |
| 2G6.4C10 | | | | |
| MEC-1 | 157,879 | 7,297 | 118,862 | 6,830 |
| SU-DHL-1 | 115,557 | 3,531 | ND | 3,236 |
| Ramos | 65,637 | 1,730 | 38,746 | 1,507 |
| SKW6.4 | 35,985 | 7,089 | 21,868 | 7,375 |
| Raji | 21,274 | 1,129 | 13,593 | 1,022 |

[1267] Because many of the identified proteins have nucleolar or cytoplasmic localization, biotin cell surface labeling of Ramos cells was used to confirm localization on the cell surface. Ramos cells were labeled with biotin to biotinylate cell surface proteins. The cells were lysed then biotinylated proteins were captured. In-solution digestion of the proteins was performed followed by protein identification with LC-MS-MS. Eleven of the proteins identified that bind specifically to C10.36 were confirmed as cell surface proteins in Ramos cells. These include: 60S ribosomal protein L11; Histone H1.2, H1.4, H1.3, H1.5; 40S ribosomal protein L11; Histone H4; Heterogeneous nuclear ribonucleoproteins; Histone H2A, H2B; ATP synthase subunit alpha, mitochondrial; rRNA 2′-O-methyltransferase fibrillarin P2; Heterogeneous nuclear ribonucleoprotein H; Nucleolin; and Heterogeneous nuclear ribonucleoprotein U.

### Example 36: Aptamer C10.36 to Monitor Sub-Complex Formation Dependent Upon Cellular Growth Conditions

[1268] We observed that Ramos cells experienced a loss of viability when grown in culture from day 4 to day 5. The decrease was from 84.5% (day 4) to 64% (day 5). However, when parallel cultures were grown in media supplemented with Gibco Glutamax™ that contains L-alanyl-L-glutamine, which is a stabilized form of L-glutamine, that allows for long-term culture growth the viability was 93.8% on day 4 and 84.8% on day 5. Affinity purification with aptamers C10.36 or C10.36(G24A) identified ribonucleoproteins unique to C10.36 (Table 46) or with low binding to C10.36(G24A) (Table 47) found in all 4 conditions. We also identified proteins that only affinity purified with aptamers C10.36 or C10.36(G24A) upon loss of viability (i.e., on day 5 v day 4) (Table 48) and proteins that only appeared in the samples not supplemented with Glutamax (Table 49).

TABLE 46
Peptides and PSMs unique to aptamer C10.36 in various conditions

| | | Day 4 | Day 4 | Day 5 | Day 5 | Day 4 | Day 4 | Day 5 | Day 5 |
|---|---|---|---|---|---|---|---|---|---|
| | Accession | C10.36 | G24A | C10.36 | G24A | C10.36 | G24A | C10.36 | G24A |
| Proteins | Number | No Glutamax | | | | Glutamax | | | |
| Poly (ADP-ribose) | P09874 | 16 | 0 | 15 | 0 | 14 | 0 | 14 | 0 |
| polymerase 1 | | | | | | | | | |
| rRNA 2′-O- | P22087 | 10 | 0 | 7 | 0 | 2 | 0 | 4 | 0 |
| methyltransferase fibrillarin | | | | | | | | | |
| Nucleolin | P19338 | 9 | 0 | 12 | 0 | 10 | 0 | 4 | 0 |
| Heterogeneous nuclear | Q00839 | 7 | 0 | 17 | 0 | 2 | 0 | 10 | 0 |
| ribonucleoprotein U | (+1) | | | | | | | | |
| Ubiquitin-60S ribosomal | P62987 | 6 | 0 | 8 | 0 | 3 | 0 | 5 | 0 |
| protein L40 | | | | | | | | | |
| Cluster of Nucleolar RNA | Q9NR30- | 6 | 0 | 6 | 0 | 1 | 0 | 2 | 0 |
| helicase 2 | 1 [2] | | | | | | | | |
| 40S ribosomal protein S8 | P62241 | 6 | 0 | 5 | 0 | 1 | 0 | 1 | 0 |
| DNA topoisomerase 1 | P11387 | 5 | 0 | 2 | 0 | 2 | 0 | 0 | 0 |
| Aspartate--tRNA ligase, | P14868 | 4 | 0 | 2 | 0 | 1 | 0 | 3 | 0 |
| cytoplasmic | (+1) | | | | | | | | |
| Nucleolar protein 56 | O00567 | 4 | 0 | 2 | 0 | 0 | 0 | 1 | 0 |
| Poly(RC)-binding protein 1 | Q15365 | 3 | 0 | 7 | 0 | 3 | 0 | 2 | 0 |
| Serine/arginine-rich | P84103 | 3 | 0 | 4 | 0 | 2 | 0 | 1 | 0 |
| splicing factor 3 | (+1) | | | | | | | | |
| Cellular nucleic acid- | P62633-1 | 3 | 0 | 0 | 0 | 1 | 0 | 2 | 0 |
| binding protein | (+3) | | | | | | | | |
| RNA-binding motif | P38159-1 | 3 | 0 | 3 | 0 | 1 | 0 | 1 | 0 |
| protein, X chromosome | | | | | | | | | |
| Cluster of Polyadenylate- | P11940-1 | 3 | 0 | 6 | 0 | 0 | 0 | 2 | 0 |
| binding protein 1 | [5] | | | | | | | | |
| Matrin-3 | P43243 | 2 | 0 | 6 | 0 | 1 | 0 | 3 | 0 |
| Cluster of RNA-binding | Q96PK6-1 | 2 | 0 | 4 | 0 | 1 | 0 | 2 | 0 |
| protein 14 | [2] | | | | | | | | |
| staphylococcal nuclease | Q7KZF4 | 2 | 0 | 4 | 0 | 1 | 0 | 0 | 0 |
| domain-containing protein 1 | | | | | | | | | |
| RuvB-like 1 | Q9Y265 | 2 | 0 | 2 | 0 | 1 | 0 | 0 | 0 |
| Cluster of DNA | P11388-1 | 2 | 0 | 1 | 0 | 1 | 0 | 0 | 0 |
| topoisomerase 2-alpha | [6] | | | | | | | | |
| trifunctional purine | P22102-1 | 2 | 0 | 2 | 0 | 0 | 0 | 1 | 0 |
| biosynthetic protein | | | | | | | | | |
| adenosine-3 | | | | | | | | | |
| 60S ribosomal protein L12 | P30050-1 | 1 | 0 | 0 | 0 | 1 | 0 | 0 | 0 |
| elongation factor Tu, | P49411 | 1 | 0 | 6 | 0 | 0 | 0 | 1 | 0 |
| mitochondrial | | | | | | | | | |
| 40S ribosomal protein S16 | P62249 | 1 | 0 | 3 | 0 | 0 | 0 | 1 | 0 |
| RNA-binding protein Raly | Q9UKM9- | 1 | 0 | 2 | 0 | 0 | 0 | 1 | 0 |
| | 1 (+1) | | | | | | | | |
| Acidic leucine-rich nuclear | Q9BTT0 | 1 | 0 | 2 | 0 | 0 | 0 | 1 | 0 |
| phosphoprotein 32 family | (+1) | | | | | | | | |
| member E | | | | | | | | | |
| Cofilin-1 | P23528 | 0 | 0 | 2 | 0 | 1 | 0 | 3 | 0 |
| High mobility group | P09429 | 0 | 0 | 1 | 0 | 1 | 0 | 1 | 0 |
| protein B1 | | | | | | | | | |
| H/ACA ribonucleoprotein | O60832-1 | 0 | 0 | 2 | 0 | 1 | 0 | 0 | 0 |
| complex subunit 4 | | | | | | | | | |
| Junction plakoglobin | P14923 | 0 | 0 | 0 | 0 | 0 | 0 | 1 | 0 |

TABLE 47
Proteins precipititated with aptamer C10.36 and C10.36(G24A) in various conditions

| | | Day 4 | Day 4 | Day 5 | Day 5 | Day 4 | Day 4 | Day 5 | Day 5 |
|---|---|---|---|---|---|---|---|---|---|
| | Accession | C10.36 | G24A | C10.36 | G24A | C10.36 | G24A | C10.36 | G24A |
| Proteins | Number | No Glutamax | | | | Glutamax | | | |
| Cluster of Heterogeneous | P07910-1 [4] | 10 | 1 | 15 | 4 | 14 | 0 | 12 | 0 |
| nuclear ribonucleoproteins | | | | | | | | | |
| C1/C2 | | | | | | | | | |
| Heterogeneous nuclear | P52272 (+1) | 9 | 0 | 8 | 1 | 7 | 0 | 6 | 0 |
| ribonucleoprotein M | | | | | | | | | |
| splicing factor, proline- | P23246-1 | 12 | 0 | 7 | 1 | 7 | 0 | 5 | 0 |
| and glutamine-rich | | | | | | | | | |
| Heterogeneous nuclear | P31943 | 7 | 0 | 11 | 4 | 5 | 0 | 6 | 0 |
| ribonucleoprotein H | | | | | | | | | |
| profilin-1 | P07737 | 6 | 0 | 6 | 3 | 5 | 0 | 6 | 0 |
| NHP2-like protein 1 | P55769 | 6 | 0 | 8 | 1 | 5 | 0 | 5 | 0 |
| Cluster of Eukaryotic | P60842 [3] | 7 | 0 | 5 | 1 | 4 | 0 | 5 | 0 |
| initiation factor 4A-I | | | | | | | | | |
| Alpha-2-HS-glycoprotein | P02765 | 2 | 0 | 0 | 5 | 4 | 0 | 0 | 0 |
| Single-stranded DNA- | Q04837 | 3 | 0 | 3 | 2 | 3 | 0 | 4 | 0 |
| binding protein, | | | | | | | | | |
| mitochondrial | | | | | | | | | |
| Cluster of Heat shock | P11142-1 [3] | 7 | 0 | 11 | 4 | 3 | 0 | 3 | 1 |
| cognate 71 kDa protein | | | | | | | | | |
| heterogeneous nuclear | P22626 | 3 | 0 | 8 | 2 | 3 | 0 | 3 | 0 |
| ribonucleoproteins A2/B1 | | | | | | | | | |
| Isoform 2 of | P61978-2 | 8 | 0 | 11 | 3 | 2 | 0 | 3 | 1 |
| Heterogeneous nuclear | | | | | | | | | |
| ribonucleoprotein K | | | | | | | | | |
| 60S ribosomal protein L30 | P62888 | 2 | 0 | 3 | 1 | 2 | 0 | 2 | 0 |
| Heterogeneous nuclear | P09651-1 (+2) | 4 | 0 | 6 | 0 | 2 | 0 | 1 | 1 |
| ribonucleoprotein A1 | | | | | | | | | |
| Rho GDP-dissociation | P52566 | 1 | 0 | 2 | 1 | 2 | 0 | 1 | 0 |
| inhibitor 2 | | | | | | | | | |
| 40S ribosomal protein S5 | P46782 | 0 | 0 | 3 | 1 | 2 | 0 | 1 | 0 |
| nucleophosmin (nucleolar | gi\|119581852 | 2 | 0 | 7 | 1 | 1 | 0 | 4 | 0 |
| phosphoprotein B23, | gb\|EAW61448.1 | | | | | | | | |
| numatrin), isoform CRA_e | (+1) | | | | | | | | |
| Stress-70 protein, | P38646 | 0 | 0 | 9 | 5 | 1 | 0 | 4 | 0 |
| mitochondrial | | | | | | | | | |
| 60S acidic ribosomal | P05388 (+1) | 2 | 0 | 2 | 6 | 1 | 0 | 1 | 0 |
| protein P0 | | | | | | | | | |
| 40S ribosomal protein S23 | P62266 | 3 | 0 | 3 | 1 | 1 | 0 | 0 | 1 |
| 40S ribosomal protein S14 | P62263 | 1 | 0 | 4 | 1 | 1 | 0 | 0 | 1 |
| Heterogeneous nuclear | P52597 | 0 | 0 | 5 | 3 | 0 | 0 | 3 | 0 |
| ribonucleoprotein F | | | | | | | | | |
| Isoform 2 of 40S | P23396-2 | 1 | 0 | 4 | 1 | 0 | 0 | 2 | 0 |
| ribosomal protein S3 | | | | | | | | | |
| Heat shock protein beta-1 | P04792 | 0 | 0 | 3 | 1 | 0 | 0 | 2 | 0 |
| 40S ribosomal protein S7 | P62081 | 0 | 0 | 1 | 2 | 0 | 0 | 2 | 0 |
| Clathrin heavy chain 1 | Q00610-1 (+1) | 1 | 0 | 5 | 0 | 0 | 0 | 0 | 1 |

TABLE 48
Identified Proteins that Increased with loss of viability

| | | Day 4 | Day 4 | Day 5 | Day 5 | Day 4 | Day 4 | Day 5 | Day 5 |
|---|---|---|---|---|---|---|---|---|---|
| | Accession | C10.36 | G24A | C10.36 | G24A | C10.36 | G24A | C10.36 | G24A |
| Proteins | Number | No Glutamax | | | | Glutamax | | | |
| Myosin-9 | P355794 | 0 | 0 | 11 | 0 | 0 | 0 | 0 | 0 |
| TAR DNA-binding protein | Q13148-1 | 0 | 0 | 3 | 0 | 0 | 0 | 0 | 0 |
| 43 | | | | | | | | | |
| DNA replication licensing | P33993-1 | 0 | 0 | 3 | 0 | 0 | 0 | 0 | 0 |
| factor MCM7 | | | | | | | | | |
| Fatty acid synthase | P49327 | 0 | 0 | 3 | 0 | 0 | 0 | 1 | 0 |
| Ubiquitin-like modifier- | P22314 | 0 | 0 | 3 | 0 | 0 | 0 | 0 | 0 |
| activating enzyme 1 | (+1) | | | | | | | | |
| Tyrosine--tRNA ligase, | P54577 | 0 | 0 | 3 | 0 | 0 | 0 | 0 | 1 |
| cytoplasmic | | | | | | | | | |
| chloride intracellular channel | O00299 | 0 | 0 | 3 | 0 | 0 | 0 | 0 | 0 |
| protein 1 | | | | | | | | | |
| Ubiquitin carboxyl-terminal | P45974-1 | 0 | 0 | 3 | 0 | 0 | 0 | 0 | 1 |
| hydrolase 5 | (+1) | | | | | | | | |
| 60S ribosomal protein L23 | P62829 | 0 | 0 | 2 | 0 | 0 | 0 | 0 | 0 |
| Polypyrimidine tract-binding | P26599 | 0 | 0 | 2 | 0 | 0 | 0 | 0 | 0 |
| protein 1 | (+2) | | | | | | | | |
| Eukaryotic translation | Q9GZV4 | 0 | 0 | 2 | 0 | 0 | 0 | 0 | 0 |
| initiation factor 5A-2 | (+2) | | | | | | | | |
| DNA replication licensing | P33992 | 0 | 0 | 2 | 0 | 0 | 0 | 0 | 0 |
| factor mcm5 | | | | | | | | | |
| 3-hydroxyacyl-CoA | Q99714-1 | 0 | 0 | 2 | 0 | 0 | 0 | 0 | 0 |
| dehydrogenase type-2 | (+1) | | | | | | | | |
| isoleucine--tRNA ligase, | P41252 | 0 | 0 | 2 | 0 | 0 | 0 | 0 | 0 |
| cytoplasmic | | | | | | | | | |
| T-complex protein 1 subunit | P78371-1 | 0 | 0 | 2 | 0 | 0 | 0 | 0 | 0 |
| beta | | | | | | | | | |
| 26S proteasome non-ATPase | O43242 | 0 | 0 | 2 | 0 | 0 | 0 | 0 | 0 |
| regulatory subunit 3 | | | | | | | | | |
| DNA replication licensing | P33991 | 0 | 0 | 2 | 0 | 0 | 0 | 0 | 0 |
| factor MCM4 | | | | | | | | | |
| 26S protease regulatory | P35998 | 0 | 0 | 2 | 0 | 0 | 0 | 0 | 0 |
| subunit 7 | | | | | | | | | |
| Fermitin family homolog 3 | Q86UX7 | 0 | 0 | 2 | 0 | 0 | 0 | 0 | 0 |
| | (+1) | | | | | | | | |
| gamma-interferon-inducible | Q16666-1 | 0 | 0 | 1 | 0 | 0 | 0 | 0 | 0 |
| protein 16 | (+2) | | | | | | | | |
| 60S ribosomal protein L18a | Q02543 | 0 | 0 | 1 | 0 | 0 | 0 | 0 | 0 |
| heterogeneous nuclear | Q14103 | 0 | 0 | 1 | 0 | 0 | 0 | 0 | 0 |
| ribonucleoprotein D0 | (+3) | | | | | | | | |
| T-complex protein 1 subunit | Q99832 | 0 | 0 | 1 | 0 | 0 | 0 | 0 | 0 |
| eta | (+2) | | | | | | | | |
| Glycine--tRNA ligase | P41250 | 0 | 0 | 1 | 0 | 0 | 0 | 0 | 0 |
| 40S ribosomal protein S4, X | P62701 | 0 | 0 | 1 | 0 | 0 | 0 | 0 | 0 |
| isoform | | | | | | | | | |
| T-complex protein 1 subunit | P40227-1 | 0 | 0 | 1 | 0 | 0 | 0 | 0 | 0 |
| zeta | | | | | | | | | |
| Bifunctional | P07814 | 0 | 0 | 1 | 0 | 0 | 0 | 0 | 0 |
| glutamate/proline--tRNA | | | | | | | | | |
| ligase | | | | | | | | | |
| Calcyclin-binding protein | Q9HB71 | 0 | 0 | 1 | 0 | 0 | 0 | 0 | 0 |
| | (+1) | | | | | | | | |
| Serine | P34897-1 | 0 | 0 | 1 | 0 | 0 | 0 | 0 | 0 |
| hydroxymethyltransferase, | (+1) | | | | | | | | |
| mitochondrial | | | | | | | | | |
| CAD protein | P27708 | 0 | 0 | 1 | 0 | 0 | 0 | 0 | 0 |
| T-complex protein 1 subunit | P48643 | 0 | 0 | 1 | 0 | 0 | 0 | 0 | 0 |
| epsilon | (+1) | | | | | | | | |
| coatomer subunit alpha | P53621-1 | 0 | 0 | 1 | 0 | 0 | 0 | 0 | 0 |
| | (+1) | | | | | | | | |
| transportin-1 | Q92973-1 | 0 | 0 | 1 | 0 | 0 | 0 | 0 | 0 |
| | (+1) | | | | | | | | |

TABLE 49
C10.36 Specific Proteins Not Identified in Glutamax Samples

| | | Day 4 | Day 4 | Day 5 | Day 5 | Day 4 | Day 4 | Day 5 | Day 5 |
|---|---|---|---|---|---|---|---|---|---|
| | Accession | C10.36 | G24A | C10.36 | G24A | C10.36 | G24A | C10.36 | G24A |
| Proteins | Number | No Glutamax | | | | Glutamax | | | |
| Isoform 3 of 60S ribosomal | P18621-3 | 4 | 0 | 0 | 0 | 0 | 0 | 0 | 0 |
| protein L17 | | | | | | | | | |
| T-complex protein 1 subunit | P50990 | 3 | 0 | 4 | 0 | 0 | 0 | 0 | 0 |
| theta | (+2) | | | | | | | | |
| Atp-dependent ma helicase a | Q08211 | 3 | 0 | 2 | 0 | 0 | 0 | 0 | 0 |
| 60S ribosomal protein L23a | P62750 | 2 | 0 | 4 | 3 | 0 | 0 | 0 | 0 |
| Pyruvate kinase PKM | P14618 | 2 | 0 | 7 | 2 | 0 | 0 | 0 | 0 |
| 26S proteasome non-ATPase | Q13200 | 2 | 0 | 5 | 0 | 0 | 0 | 0 | 0 |
| regulatory subunit 2 | | | | | | | | | |
| Coronin-1A | P31146 | 2 | 0 | 3 | 0 | 0 | 0 | 0 | 0 |
| 40S ribosomal protein S11 | P62280 | 2 | 0 | 3 | 0 | 0 | 0 | 0 | 0 |
| Nucleolar protein 58 | Q9Y2X3 | 2 | 0 | 3 | 0 | 0 | 0 | 0 | 0 |
| Insulin-like growth factor 2 | Q9NZI8 | 2 | 0 | 2 | 0 | 0 | 0 | 0 | 0 |
| mRNA-binding protein 1 | | | | | | | | | |
| Poly(rC)-binding protein 2 | Q15366-1 | 1 | 0 | 2 | 1 | 0 | 0 | 0 | 0 |
| | (+7) | | | | | | | | |
| Asparagine synthetase | P08243-1 | 1 | 0 | 1 | 1 | 0 | 0 | 0 | 0 |
| (glutamine-hydrolyzing) | (+1) | | | | | | | | |
| Interleukin enhancer-binding | Q12906-1 | 1 | 0 | 0 | 1 | 0 | 0 | 0 | 0 |
| factor 3 | (+6) | | | | | | | | |
| 60 kDa heat shock protein, | P10809 | 1 | 0 | 3 | 0 | 0 | 0 | 0 | 0 |
| mitochondrial | | | | | | | | | |
| 60S ribosomal protein L29 | P47914 | 1 | 0 | 3 | 0 | 0 | 0 | 0 | 0 |
| Heterogeneous nuclear | Q13151 | 1 | 0 | 3 | 0 | 0 | 0 | 0 | 0 |
| ribonucleoprotein A0 | | | | | | | | | |
| 60S ribosomal protein L24 | P83731 | 1 | 0 | 2 | 0 | 0 | 0 | 0 | 0 |
| ATP-dependent RNA helicase | O00571 | 1 | 0 | 2 | 0 | 0 | 0 | 0 | 0 |
| DDX3X | (+1) | | | | | | | | |
| ATP-citrate synthase | P53396-1 | 1 | 0 | 1 | 0 | 0 | 0 | 0 | 0 |
| | (+1) | | | | | | | | |
| ATP-dependent RNA helicase | Q9NVP1 | 1 | 0 | 1 | 0 | 0 | 0 | 0 | 0 |
| DDX18 | | | | | | | | | |
| Cluster of ADP/ATP | P05141 [2] | 1 | 0 | 1 | 0 | 0 | 0 | 0 | 0 |
| translocase 2 | | | | | | | | | |
| DNA replication licensing | P25205 | 1 | 0 | 1 | 0 | 0 | 0 | 0 | 0 |
| factor mcm3 | (+1) | | | | | | | | |
| chromobox protein homolog 3 | Q13185 | 1 | 0 | 1 | 0 | 0 | 0 | 0 | 0 |
| heterogeneous nuclear | O43390-1 | 1 | 0 | 0 | 0 | 0 | 0 | 0 | 0 |
| ribonucleoprotein r | (+1) | | | | | | | | |
| Nuclear pore membmne | Q81EM1-1 | 1 | 0 | 0 | 0 | 0 | 0 | 0 | 0 |
| glycoprotein 210 | | | | | | | | | |
| 40S ribosomal protein S3a | P61247 | 0 | 0 | 1 | 1 | 0 | 0 | 0 | 0 |
| ATP-dependent RNA helicase | O00148 | 0 | 0 | 1 | 1 | 0 | 0 | 0 | 0 |
| DDX39A | | | | | | | | | |
| multifunctional protein ADE2 | P22234 | 0 | 0 | 1 | 1 | 0 | 0 | 0 | 0 |
| ubiquitin-conjugating enzyme | P61088 | 0 | 0 | 0 | 1 | 0 | 0 | 0 | 0 |
| E2 N | | | | | | | | | |
| Interleukin enhancer-binding | Q12905 | 0 | 0 | 1 | 1 | 0 | 0 | 0 | 0 |
| factor 2 | | | | | | | | | |

[1269] Proteins that form the TriC chaperone folding complex, MCM helicase complex, and the Aminoacyl-tRNA synthetase complex were isolated with the ribonucleoprotein complex identified above. These suggest a role in protein folding or cellular compartmentalization of translation or alternate splicing. Proteins that were detected specifically bound to C10.36 but not detected in cells treated with Glutamax™ at Day 4 or Day 5 include ATP-dependent helicases as well as other ribonucleoproteins. Taken together, these results demonstrate that C10.36 can bind a dynamic ribonucleoprotein complex and specific sub-complexes can be identified in different cellular conditions.

### Example 37: Mechanism of C10.36 Induced Cell Death

[1270] In this Example, we performed gene expression analysis to explore the mechanism of C10.36 induced cell death (see, e.g., Examples 29 and 34 above).

[1271] First, we used the Human Lymphoma RT² Profiler PCR Array (Qiagen, Inc. Product number 330231) containing 84 genes involved in lymphoma development, classification, prognosis, and therapeutic response to assess gene expression in SU-DHL-1 cells after treatment with C10.36 for 48 hours versus a no aptamer control. The genes included on the array are shown in Table 50, and adapted from www.qiagen.com/us/shop/pcr/primer-sets/rt2-profiler-pcr-arrays/?catno=PAHS-139Z#geneglobe.

TABLE 50
Human Lymphoma RT² Profiler PCR Array

| Gene Class | Genes |
|---|---|
| Differentially Methylated | AFF1, ATM, CADM1 (TSLC1), CCND1, CDH1 (E-Cadherin), |
| Promoters | CDH13, CDKN1C (p57Kip2), CDKN2B (p15INK4b), CDKN2C (p18- |
| | INK4C), DAPK1, DLC1, FHIT, GSTP1, HIC1, HRK, ID4, LRP1B, |
| | MLH1, MYOD1, RASSF1, RBP1, SLC19A1, TIMP2, TIMP3 |
| Diffuse Large B-Cell | ASB13, BCL6, ITPKB, LMO2, LRMP, MYBL1, PAG1, PTK2 (FAK), |
| Lymphoma Survival | TTC9, VGLL4 |
| Follicular Lymphoma Survival | C1QA, CCR1, F8, FCGR1A, FLT3LG, STAT4, TLR5, TNFRSF1B, |
| | TNFSF13B |
| Lymphoma Therapeutic | BCL6, BIRC5, BTK, CD22, CD40 (TNFRSF5), CD80, CXCR4, |
| Targets | FCGR1A, HSP90AA1, MCL1, MS4A1, MTOR, NOTCH1, PARP1 |
| | (ADPRT1), PTK2 (FAK), SRC, SYK, TGFB1, TNFSF13B |
| Inflammatory Response | C1QA, CCR1, CD40 (TNFRSF5), CD40LG (TNFSF5), CSF3 (GCSF), |
| | CXCR4, F8, IL6, NFKB1, TGFB1, TLR5, TNF, TNFRSF1B |
| Immune System Processes | BCL6, C1QA, CADM1 (TSLC1), CD2, CD4, CD40 (TNFRSF5), CD5, |
| | CD79A, CD80, FCER2, IFNG, IL2, IL6, ITPKB, PDLIM7, PTPRC, |
| | SYK, TGFB1, TNFSF13B |
| T-Cell Differentiation | BCL2, CD3D, CD4, CD8A, ITPKB, IL2, PTPRC, SYK, TGFB1, TP53 |
| | (P53) |
| Cell Adhesion Molecules | BCL2, CADM1 (TSLC1), CCR1, CD2, CD22, CD34, CD4, CD40LG |
| | (TNFSF5), CD47, CD8A, CDH1 (E-Cadherin), CDH13, DLC1, F8, |
| | IL2, NCAM1, PTPRC, SRC, SYK, TNF |
| Cell Cycle | ATM, BCL2, BIRC5, CCND1, CDKN1C (p57Kip2), CDKN2B |
| | (p15INK4b), CDKN2C (p18-INK4C), ID4, IFNG, MKI67, MLH1, |
| | MYC, RASSF1, TGFB1, TP53 (p53) |
| AKT & PI3 Kinase Signaling | ALK, BCL2, BTK, CCND1, CCR1, CD2, CD4, CD40 (TNFRSF5), |
| | CD40LG (TNFSF5), CSF3 (GCSF), CXCR4, HSP90AA1, IL2, IL6, |
| | MTOR, PTK2 (FAK), SYK, TGFB1, TIMP2, TIMP3, TNFRSF1B, |
| | TNFSF13B, TP53 (p53) |
| Gene Fusion | ALK, MME |
| DNA Damage & Repair | DNTT |

[1272] 2.5M SU-DHL-1 cells were treated for 48 h with 200 nM C10.36 or without aptamer as a control. FIG. 29 shows a comparison of gene expression in cells treated with or without the aptamer. The figure reveals a number of genes that were upregulated or downregulated in the C10.36 treated cells versus controls, as indicated. Genes involved in IL6/Stat signaling pathway and belonging to the Immunoglobulin receptor superfamily or cell adhesion were identified as differentially expressed. See Table 51. In the table, the UniProt ID of differentially expressed genes is shown. Negative Differential expression indicates that expression was reduced in the presence of C10.36, whereas positive differential expression indicates that expression increased in the presence of C10.36. As indicated, it has been reported that SU-DHL-1 are CD80 and CD22 negative and IL6R positive. It has also been reported that CD80, CXCR4 and CD22 are targets for lymphoma therapies.

TABLE 51
Gene expression in SU-DHL-1 cells treated with or without aptamer C10.36

| | | Lymphoma | | | | | | |
|---|---|---|---|---|---|---|---|---|
| UniProt | Untreated | Therapy | Signaling | | Differential | GO | | |
| ID | SUDHL1 | Target | Pathway | Gene ID | expression | enrichment | GO classification | Localization |
| P33681 | CD80 neg | Yes | Upstream | CD80 | −11.69 | virus | adhesion | cell surface |
| | | | IL6/Stat | | | receptor | | |
| | | | signaling | | | activity | | |
| P61073 | | Yes | IL6/Stat | CXCR4 | −6.72 | virus | Immunoglobulin | cell surface |
| | | | signaling | | | receptor | receptor | |
| | | | | | | activity | superfamily cell | |
| | | | | | | | adhesion | |
| Q9BY67 | | | | CADM1 | −5.07 | | | |
| P06734 | | | | FCER2/CD23 | −2.27 | | Immunoglobulin | cell surface |
| | | | | | | | receptor | |
| | | | | | | | superfamily cell | |
| | | | | | | | adhesion | |
| P27987 | | | | ITPKB | −2.08 | | adhesion | |
| Q12912 | | | | LRMP | −2.06 | | | |
| P29965 | | | IL6/Stat | CD40LG | 2.05 | | adhesion | cell surface |
| | | | signaling | | | | | |
| P01730 | | | IL6/Stat | CD4 | 2.32 | virus | Immunoglobulin | cell surface |
| | | | signaling | | | receptor | receptor | |
| | | | | | | activity | superfamily | |
| P20273 | CD22 neg | Yes | | CD22 | 9.64 | | Immunoglobulin | |
| | | | | | | | receptor | |
| | | | | | | | superfamily cell | |
| | | | | | | | adhesion | |
| P13591 | | | | NCAM1 | 10.81 | virus | Immunoglobulin | cell surface |
| | | | | | | receptor | receptor | |
| | | | | | | activity | superfamily cell | |
| | | | | | | | adhesion | |
| P05231 | IL6R pos | | IL6/Stat | IL6 | 11.25 | | adhesion | cell surface |
| | | | signaling | | | | | |
| P09455 | | | | RBP1 | 12.1 | | | |
| Q92623 | | | | TTC9 | 13.86 | | | |

[1273] In addition, we analyzed Ramos cells treated with aptamer C10.36 versus no aptamer for 6 or 48 hours using whole transcriptome shotgun sequencing by RNA-Seq analysis. 1.7M Ramos were grown in triplicate and treated with 700 nM aptamer C10.36, which is ˜3×IC₅₀, or no aptamer as a control. Expression was analyzed at 6 h, 24 h, and 48 h after treatment.

[1274] Cell viability was assessed as above using Cell Titer Glo, which measures ATP levels. Under all conditions, the cells appeared to be in lag phase (data not shown). Although the cells grown in flasks were still in lag phase, we detected significant differential expression of 8 genes and 16 transcripts after 6 hrs (Table 52) and 7 genes and 9 transcripts after 48 hrs (Table 53). In the tables, FPKM stands for Fragments Per Kilobase of transcript per Million mapped reads. In RNA-Seq, the relative expression of a transcript is proportional to the number of cDNA fragments that originate from it. FPKM is calculated by counting fragments. As indicated in Table 52, at the 6 h time point, MYCBP2, HUWE1, MALAT1, USP34, TRRAP, and PSAT1 were expressed at higher values in the absence of aptamer C10.36 whereas NEAT1 amd MIF were expressed at higher values in the presence of aptamer C10.36. As indicated in Table 53, at the 48 h time point, MALAT1, BNIP3L, and BNIP3 were expressed at higher values in the absence of aptamer C10.36 whereas TMEM259, SLC4A2, MIF and were expressed at higher values in the presence of aptamer C10.36.

TABLE 52
Differential gene expression 6 hrs after treatment with aptamer C10.36

| | log₂ (FPKM) | Raw (FpKM) | log₂ (FPKM) | Raw (FPKM) | | | |
|---|---|---|---|---|---|---|---|
| Gene | No aptamer | No aptamer | 10.36 | 10.36 | log₂ (Ratio) | Raw (Ratio) | q Value |
| MYCBP2 | 4.67 | 25.46 | 4.24 | 18.0 | −0.43 | 0.74 | 3.45e−2 |
| HUWE1 | 4.58 | 23.91 | 4.22 | 18.63 | −0.36 | 0.77 | 3.45e−2 |
| MALAT1 | 6.72 | 105.42 | 6.26 | 76.64 | −0.46 | 0.73 | 3.45e−2 |
| USP34 | 5.84 | 57.28 | 5.6 | 48.50 | −0.24 | 0.85 | 3.45e−2 |
| TRRAP | 4.42 | 21.41 | 3.97 | 15.67 | −0.45 | 0.73 | 3.45e−2 |
| PSAT1 | 7.73 | 212.3 | 7.41 | 170.07 | −0.33 | 0.80 | 3.45e−2 |
| NEAT1 | 5.63 | 49.52 | 6.25 | 76.11 | 0.62 | 1.54 | 3.45e−2 |
| MIF | 8.72 | 421.68 | 9.18 | 580.04 | 0.46 | 1.38 | 3.45e−2 |

TABLE 53
Differential gene expression 48 hrs after treatment with aptamer C10.36

| | log₂ (FPKM) | Raw (FPKM) | log₂ (FPKM) | Raw (FPKM) | | | |
|---|---|---|---|---|---|---|---|
| Gene | No aptamer | No aptamer | 10.36 | 10.36 | log₂ (Ratio) | Raw (Ratio) | q Value |
| TMEM259 | 5.01 | 32.22 | 5.56 | 47.18 | 0.55 | 1.46 | 4.53e−2 |
| SLC4A2 | 4.42 | 21.40 | 5.05 | 33.13 | 0.64 | 1.56 | 4.53e−2 |
| MIF | 9 | 512 | 9.58 | 765.36 | 0.57 | 1.49 | 4.53e−2 |
| SH2B2 | 5.08 | 33.82 | 5.99 | 63.56 | 0.91 | 1.88 | 4.53e−2 |
| MALAT1 | 6.22 | 74.54 | 5.77 | 54.57 | −0.45 | 0.73 | 4.53e−2 |
| BNIP3L | 4.81 | 28.05 | 3.92 | 15.14 | −0.89 | 0.54 | 4.53e−2 |
| BNIP3 | 5.74 | 53.45 | 4.99 | 31.78 | −0.75 | 0.60 | 4.53e−2 |

[1275] Two of the identified transcripts, MALAT1 and NEAT1, encode long non-coding RNA (IncRNA) upregulated in cancers and shown to increase epithelial cell proliferation. See e.g., Wang et al., LncRNA MALAT1 promotes development of mantle cell lymphoma by associating with EZH2. J Transl Med. 2016 Dec. 20; 14(1):346; Wang et al. The Association between Abnormal Long Noncoding RNA MALAT-1 Expression and Cancer Lymph Node Metastasis: A Meta-Analysis. Biomed Res Int. 2016; 2016:1823482. doi: 10.1155/2016/1823482. Epub 2016 Jan. 27.; Tripathi et al., The nuclear-retained noncoding RNA MALAT1 regulates alternative splicing by modulating SR splicing factor phosphorylation, Mol Cell. 2010 Sep. 24; 39(6):925-38; Han et al., Hsa-miR-125b suppresses bladder cancer development by down-regulating oncogene SIRT7 and oncogenic long noncoding RNA MALAT1, FEBS Lett. 2013 Oct. 25. pii: S0014-5793(13)00780-1; all of which references are incorporated herein by reference in their entirety. Incubation with C10.36 for 6 hrs also decreased the levels of MYCBP2, HUWE1, and TRRAP which have been shown to regulate Myc activation, an oncogenic protein that is deregulated in the majority of B-cell lymphomas. See McMahon et al. The essential cofactor TRRAP recruits the histone acetyltransferase hGCN5 to c-Myc, Mol. Cell. Biol. 2000; 20:556-562; which reference is incorporated herein by reference in its entirety. Although not differentially regulated, a novel ABC1B-CUX1 fusion protein was also detected in the Ramos cells. Park et al. found recurrent copy gains of TRRAP and CUX1 in diffuse large B-cell lymphoma (DLBCL) patients refractory to CHOP (rituximab, cyclophosphamide, doxorubicin, vincristine and prednisone) treatment. Park et al., Whole-exome and transcriptome sequencing of refractory diffuse large B-cell lymphoma, Oncotarget. 2016 Dec. 27; 7(52):86433-86445; which reference is incorporated herein by reference in its entirety. These data suggest that DLBCL patients that experience disease relapse or are refractory to CHOP treatment may respond to treatment with C10.36 because C10.36 can reduce TRRAP levels in cells with an ABC1B-CUX1 fusion.

### Example 38: hnRNPU is a Direct Binding Partner of Aptamer C10.36

[1276] In this Example, aptamer C10.36 was crosslinked to target proteins to further elucidate potential binding partners. Sulfo-SDAD (Sulfo-NHS-SS-Diazirine; sulfosuccinimidyl 2-((4,4′-azipentanamido)ethyl)-1,3′-dithiopropionate) heterobifunctional cross-linker was conjugated to an amine on T14 of C10.36 and photo-crosslinked to protein targets on Ramos cells. Incorporation of SDAD does not disrupt target binding but may rather stabilize the aptamer's G-quadruplex structure and enhance binding. Sulfo-SDAD may deliver more efficient cross-linking than Sulfo-SBED used in various experiments above and thus provide complementary results. See, e.g., Table 36 and FIG. 18F for SBED results. Proteins were separated on reducing gels as above and transfer of SDAD from the aptamer to the target protein by reduction of the disulfide bond in SDAD was confirmed by detecting a modified crosslinking agent in the gel by Western blotting. MS/MS as above was used to identify protein fragments that contained the transferred SDAD label. Heterogeneous nuclear ribonucleoprotein U (hnRNPU; hnRNP U; Scaffold attachment factor A; SAF-A; p120; pp 120) was identified as crosslinked to aptamer C10.36 in these experiments. In agreement with these data, it has been found that similar proteins as reported here co-immunoprecipitate with hnRNPU. The peptide that we cross-linked in this Example is also directly up-stream of the RGG box, which is important for interactions with other hnRNP proteins to form hnRNP particles. See Pifiol-Roma, et al., Immunopurification of heterogeneous nuclear ribonucleoprotein particles reveals an assortment of RNA-binding proteins. GENES & DEVELOPMENT 2:215-227 (1988); Kiledjian M and Dreyfuss G: Primary structure and binding activity of the hnRNP U protein: binding RNA through RGG box. EMBO J 11: 2655-2664, 1992; which references are incorporated by reference herein in their entirety.

[1277] Without being bound by theory, our data indicate that aptamer C10.36 plays a role in effecting MYC activity in the cellular environment. The Myc proto-oncogene protein (MYC) is a transcription factor that binds DNA in a non-specific manner, yet also specifically recognizes the core sequence 5′-CAC[GA]TG-3′. Myc activates the transcription of growth-related genes and is known to play a role in neoplastic growth and proliferative diseases including various cancers. See, e.g., Dang, MYC on the Path to Cancer, Cell 149 (2012), which reference is incorporated by reference herein in its entirety. hnRNPU is a coactivator of the c-Myc-Max transcriptional activator complex and is essential for cell proliferation. It directly interacts with c-Myc-Max complex on E-box promoter of the ornithine decarboxylase (ODC) gene. See Matsuoka et al., Oncol Rep. 2009 August; 22(2):249-55, which reference is incorporated by reference herein in its entirety. Moreover hnRNPU is a component of the CRD-mediated complex that promotes MYC mRNA stabilization. See www.uniprot.org/uniprot/Q00839.

[1278] Additional data points toward a role of MYC in the action of aptamer C10.36. For example, we observed that C10.36 treatment reduces level of TRRAP mRNA. See Example 37. TRRAP binds Myc and recruits the Histone Acetyl Transferase complex resulting in increased histone acetylation and cellular proliferation. Because C10.36 treatment reduces TRRAP levels, it is possible that C10.36 deregulates downstream histone acetylation resulting in apoptosis. In addition, we found that C10.36 treatment reduces level of HUWE1. See Example 37. HUWE1 is a ubiquitin ligase that directly regulates Myc by adding a single ubiquitin to the Myc protein resulting in direct stabilization of the Myc protein. Reduction of HUWE1 could potentially result in destabilization of Myc protein thus inducing apoptosis. We also found that aptamer C10.36 treatment increased levels of MIF RNA expression to no aptamer control. See Example 37. MIF is a potent regulator of inflammation and cell growth and its loss impairs Myc-induced lymphomagenesis. Overexpression of GYS1, MIF, and MYC is associated with adverse outcomes and poor response to azacitidine in myelodysplastic syndromes and myeloid leukemia. The IncRNA MALAT1 was decreased upon treatment with C10.36. See See Example 37. MALAT1 controls cellular proliferation through a regulation of histone modification and splicing regulation, and various ribonucleoproteins we identified as C10.36 binding targets regulate chromatin modification and splicing. N-Myc up regulates both the histone demethylase (JMJD1A) and MALAT1 gene in N-Myc oncogene-amplified human neuroblastoma cells by directly binding the JMJD1A gene promoter and JMJD1A binds the MALAT1 gene promoter. Increased JMJD1A and MALAT1 induced neuroblastoma cell migration and invasion. See, e.g., Tee et al, The histone demethylase JMJD1A induces cell migration and invasion by up-regulating the expression of the long noncoding RNA MALAT1. Oncotarget. 2014 Apr. 15; 5(7): 1793-804, which reference is incorporated by reference herein in its entirety. MALAT1 may mediate mRNA stability and splicing, and recruit histone-modifying complexes (such as those we identified as C10.36 target proteins above), forming RNA-dsDNA triplex. Interaction of DNA, RNA and proteins is involved in lncRNAs role in gastric tumorigenesis and development. These data further suggest that aptamer C10.36 could be used as a MALAT1 inhibitor for the prevention of tumor metastasis.

[1279] Our data also indicate that aptamer C10.36 may be used as viral inhibitor since hnRNPU binds complement receptor type 2 (CR2), which acts as an Epstein Barr Virus receptor. See www.uniprot.org/uniprot/P20023.

### Example 39: The B-Cell Lymphoma Specific Aptamer C10.36 Binds a Ribonucleoprotein

[1280] The DNA aptamer C10.36 forms a G-quadruplex structure and has been shown to bind the Ramos Burkitt's lymphoma cell line. See Opazo F, et al. (2015). Modular Assembly of Cell-targeting Devices Based on an Uncommon G-quadruplex Aptamer Molecular Therapy. Mol Ther Nucleic Acids. 2015 September; 4(9): e251. In this Example, we provide further details on the identification of the molecular target of C10.36. Aptamer-affinity purification, followed by LC-MS/MS revealed unique proteins pulled down with C10.36 associated with Ramos cells but not Jurkat, a T-cell lymphocyte cell line. The majority of the identified target molecules were found to be associated within ribonucleoprotein complexes, of which the abundant and consistent belong to the nucleolin complex including nucleolin (NCL) itself and its interacting partners, i.e. nucleophosmin (NPM1), heterogeneous nuclear ribonucleoprotein (HNRNP) family members such as HNRNP C1C2 and U, rRNA 2′-O-methyltransferase fibrillarin (FBL), actin (ACTB), nucleolar RNA helicase 2 (DDX21), and proline- and glutamine-rich splicing factors (SFPQ). All proteins identified in the above ribonucleoprotein complex are aberrantly expressed on the surface of several disparate cancer cell types and have been shown to play an oncogenic role in cancer. We tested the effect of C10.36 on viability of Ramos and other non-Hodgkin's B-cell lymphoma (NHL) cancer cell lines. Our results indicate that C10.36 treatment causes specific cell death of certain lymphoma cell lines such as Ramos but not Jurkat cells.

[1281] FIG. 18A shows flow cytometry analysis of C10.36 shows specific binding to Ramos cells but not to Jurkat cells. FIG. 18C shows affinity-purification with C10.36, which revealed greater number of proteins bound to C10.36 in Ramos compared to Jurkat cells. FIG. 23A illustrates a network map based on known protein-protein interactions from Interolog Finder (interologfinder.org) indicating putative multi-protein complexes of potential C10.36 targets. Targets detected by LC-MS/MS are double circled in the figure. See e.g., Tables 29, 31, 32, 39-44 above. We further found that C10.36 directly binds ribonuclear protein hnRNP U on the surface of Ramos cells. The direct molecular target of C10.36 was identified using the workflow 2300 in FIG. 23B. This is similar to the aptamer based affinity labelling (ABAL) protocol reported by Vinkenborg et al, Angew Chem Int Ed Engl. 2012, 51:9176-80. A Ramos cell 2302 comprising surface antigens 2301 was contacted with a construct comprising C10.36 aptamer 2304 which is biotinylated 2305 and linked to crosslinker T14 SDAD (NHS-SS-Diazirine) (succinimidyl 2-[(4,4′-azipentanamido)ethyl]-1,3′-dithiopropionate) 2303. After the aptamer is allowed to contact its target 2301 on the Ramos cells 2302, the complex is irradiated with UV light 2306 to form a crosslink between the SDAD 2303 and target 2301. Aptamer target complexes are affinity purified 2307 using streptavidin beads 2308, reduced 2309, then separated by PAGE gel 2310. Bands are excised from the gel 2312 and constructs are reduced 2312. This step results in target protein 2313 labeled with SDAD 2314 to form a complex 2315. The gel band is alkylated 2316 with Iodoacetyl Tandem Mass Tag label reagents (Thermo Scientific) iodoTMT 126/129 2317. The complex 2315-2317 is subjected to trypsin digestion 2318 and analyzed by LC-MS/MS 2319 to identify peptides.

[1282] A closer view of the structure of C10.36 aptamer 2304 is shown in FIG. 23C. The figure also shows the location of the point location in the G24A variant. FIG. 23D shows a closer view of the variant of C10.36 2304 carrying an hexamine-linker at the position C5 of T14, which was further modified with succinimidyl 2-([4,4′-azipentanamido]ethyl)-1,3′-dithiopropionate (SDAD) yielding C10.36_{SDAD} 2303. FIG. 23E shows a closer view of the reaction 2316 between recovered proteins 2315 with the 126 Da MS/MS reporter iodoacetyl-tandem mass tag (Iodo-TMT126) 2317 allowing secondary confirmation of the presence of SDAD labelled peptide targets.

[1283] Following the above process, hnRNP U was the only protein detected with the precursor mass of the peptide with the TMT-SDAD label and both the 126 and 129 reporter ions in the MS/MS spectrum a single peptide. The peptide is sequence KRFILDQTNVSAAAQR (SEQ ID NO. 4409), which showed the iodoTMT-SDAD modification on arginine. A schematic of the hnRNP U protein is shown in FIG. 23F. The crosslinked peptide identified above (indicated by the arrow) is located within the AAA+ATPase domain which is upstream of the RNA/DNA binding RGG domain. Likewise FIG. 23G shows a ribbon diagram of the modeled hnRNP U protein, modeled on PDB-3ZVL, with the putative C10.36 binding site site circled.

[1284] Preferential binding of C10.36 to different Non-Hodgkins lymphoma (NHL) cell lines was assessed by flow cytometry. Results are shown in FIG. 23H, which plots concentration of aptamer versus MESF (see below). At each concentration, the cell lines from left to right were: SU-DHL-1, Ramos, Ramos 2G6.4 C10, Daudi, Raji, MEC1, SKW6.4 and Jurkat. To compare binding levels across cell lines, internal standardization was carried out to obtain the molecules of equivalent soluble fluorochrome (MESF) values. Ramos 2G6.4 C10 and MEC1 cells showed highest level of binding, followed by SU-DHL-1 and Ramos cells. Daudi, Raji and SKW6.4 cells displayed low binding levels, similar to Jurkat cells. No binding to negative control aptamer G24A was observed in these experiments (FIG. 23I).

[1285] We further found that C10.36 consistently binds a core ribonucleoprotein complex across non-Hodgkin's lymphoma cell lines. Affinity purified targets of C10.36 on different NHL cell lines assessed by a silver stained gel show a greater number of proteins bound to C10.36 than G24A. See FIG. 23J. In these experiments, 1,000,000 cells were used compared to 100,000 cells in the complementary experiments in FIG. 21A. Using LC-MS/MS to identify proteins in the bands across different NHL cell lines, Jurkat and SKW6.4, a non-tumor derived EBV transformed cell line, we again observed C10.36 binding to common core proteins within the ribonucleoprotein complex. Table 54 shows ten common proteins that were identified that specifically interact with C10.36 on NHL cells and six proteins that were identified across all cell lines. In the table, (*) indicates potential ribonucleoprotein targets of C10.36 confirmed to be present on the surface of the Ramos, SU-DHL-1, MEC1, Jurkat, and SKW6.4 cells through biotin surface labeling. And (**) indicates proteins also detected in non-biotin controls.

TABLE 54
Common proteins that interact with C10.36

| Protein | Bound cells |
|---|---|
| Nucleolin ** | NHL |
| RNA-binding motif protein, X chromosome | NHL |
| Ubiquitin-60S ribosomal protein L40 ** | NHL |
| Heat shock cognate 71 kDa protein ** | NHL |
| Prohibitin | NHL |
| Heterologous nuclear ribonucleoprotein U * | NHL |
| rRNA 2′-O-methyltransferase fibrillarin | NHL |
| RNA-binding protein 14 | NHL |
| 78 kDa glucose-regulared protein * | NHL |
| 60S ribosomal protein L22 | NHL |
| Heterologous nuclear ribonucleoproteins C1/C2 | All |
| Actin, cytoplasmic 2 | All |
| Nucleophosmin | All |
| Heterologous nuclear ribonucleoprotein A1 ** | All |
| Splicing factor, proline- and glutamine-rich * | All |
| Histone H3.3 | All |

[1286] Without being bound by theory, FIGS. 23K-L show a model for C10.36 mediated toxicity in non-Hodgkin's lymphoma cells. See FIGS. 20A-H, FIG. 23K: Ribonucleoproteins like hnRNP U are known to regulate of global splicing in the nucleus. See Xiao R, et al. (2012). Nuclear Matrix Factor hnRNP U/SAF-A Exerts a Global Control of Alternative Splicing by Regulating U2 snRNP Maturation. Mol Cell. In NHL cells hnRNP U is also aberrantly localized in a cell surface ribonucleoprotein complex (CSRC). FIG. 23L: C10.36 binding to the CSRC leads to its lipid raft dependent internalization. Upon hnRNP U mediated C10.36 uptake, significant changes in splicing occur. MYC driven lymphomas are susceptible to splicing defects (Kon C M, et al. (2015). MYC regulates the core pre-mRNA splicing machinery as an essential step in lymphomagenesis. Nature; Hsu T Y T, et al (2015). The spliceosome is a therapeutic vulnerability in MYC-driven cancer. Nature), therefore C10.36 mediated global alternative splicing disrupts cellular homeostasis and leads to cell death by necrosis.

[1287] In conclusion, this Example builds on the invention. We found that C10.36 interacts with a ribonucleoprotein complex on the surface of NHL cells and that C10.36 binds hnRNP U directly within the ribonucleoprotein complex. When performing these pulldown experiments under various settings and conditions, we observe that the members of the complex are dynamic but certain proteins are identified consistently, e.g., splicing factors. C10.36 treatment inhibits cell viability in certain NHL cell lines. The oncogene c-MYC is commonly over-expressed in NHL cells. hnRNP U has previously been shown to stabilize c-MYC mRNA as well as promote c-MYC transcriptional activity. See, e.g., Weidensdorfer D, et al. (2009). Control of c-myc mRNA stability by IGF2BP 1-associated cytoplasmic RNPs. RNA. 2009 January; 15(1): 104-115. doi: 10.1261/rna.1175909; Matsuoka Y, et al. (2009). hnRNP U interacts with the c-Myc-Max complex on the E-box promoter region inducing the ornithine decarboxylase gene. Oncol Rep. 2009 August; 22(2):249-55; which references are incorporated by reference herein in their entirety. Without being bound by theory, C10.36 mediated toxicity may be a result of indirect inhibition of c-MYC by sequestering hnRNP U. C10.36 represents a B-cell lymphoma targeting compound, with therapeutic applications in cancer.

### Example 40: Aptamer C10.36 Identifies Targets for CAR-T Therapy

[1288] Immune-oncology approaches to treat cancer and other diseases include the engineering of a patient's own T-cells, a type of immune cell collected from the patient's blood. The collected T cells are genetically engineered to produce receptors on their surface called chimeric antigen receptors (CARs). CARs are engineered T cell receptors that allow the T cells to recognize a given protein (antigen) on tumor cells, e.g., a protein that is specifically or abarrently expressed on cancer cells. These engineered CAR-T cells are propagated in vitro, e.g., until they number in the billions. To effect therapy, the expanded population of CAR T cells is infused into the patient. After the infusion, the T cells multiply in the patient's body and, with guidance from their engineered receptor, recognize and kill cancer cells that harbor the target antigen on their surfaces. For reviews, see e.g., Trapani and Darcy, Immunotherapy of cancer, AFP VOL. 46, NO. 4, APRIL 2017; Wilkins et al., CAR T-Cell Therapy: Progress and Prospects, HUMAN GENE THERAPY METHODS, VOLUME 28 NUMBER 2; each of which is incorporated herein by reference in its entirety.

[1289] Clinical trials are ongoing with multiple CAR-T candidates. For example, T cells have been engineered to target the CD19 antigen, which is present on the surface of nearly all B cells, both normal and cancerous. In this setting, patients are able to tolerate killing of non-cancer B cells. However, as many cancer antigens are expressed on healthy cells, CAR-T therapy may result in severe toxicity, including patient death. Aptamer C10.36 provided herein has identified a group of nuclear proteins that are aberrantly expressed on the surface in certain lymphoma and leukemias. See Examples above. Thus, the targets of aptamer C10.36 are attractive targets for use as the cancer antigen targeted by the CAR-T construct. The invention provides a method of treatment comprising engineering CAR-T cells to recognize a target protein of aptamer C10.36, including without limitation the proteins listed in any one of Table 29, Table 31, Table 32, Table 39, Table 40, Table 41, Tables 46-49, Table 54, Tables 57-59 or a subcomponent of any protein listed therein.

### Example 41: C10.36 is Internalized into Ramos Cells by Lipid Raft Mediated Endocytosis

[1290] Aptamer C10.36 (C10.36; SEQ ID NO. 4357) internalization was assessed by confocal microscopy. One million cells were incubated with Alexa-488 labeled C10.36 or control aptamer G24A (10.36(G24A); SEQ ID NO. 4369) at 4° C. (surface binding) or 37° C. (internalization) for 30 min. All incubations were performed in complete medium. After the respective incubations with the aptamer, cells were washed with PBS and fixed in 4% paraformaldehyde, followed by cell membrane staining with Texas Red-X conjugated Wheat Germ Agglutinin. Ramos cells specifically bound and internalized C10.36 whereas Jurkat cells showed significantly less binding and no internalization (FIG. 24A). G24A did not show significant surface binding or internalization in either cell line (not shown). Next, we tested the dependence of C10.36 internalization on lipid rafts. For the inhibition of lipid raft-mediated endocytosis, cells were pretreated with 4 mM methyl-β-cyclodextrin (MβCD) or DMSO control in complete medium for 15 minutes at 37° C. and then incubated with aptamer for additional 30 minutes at 37° C. We observed that (MβCD) mediated removal of membrane cholesterol resulted in a significant decrease in the number of cells with internalized aptamers indicating that lipid rafts are essential for C10.36 uptake (FIG. 24B).

### Example 42: C10.36 Internalization Leads to Changes in Splicing in Ramos Cells

[1291] Ribonucleoproteins like hnRNP U are known regulate of global splicing in the nucleus¹. We have identified that in Ramos Burkitt lymphoma cells hnRNP U is also aberrantly localized in a cell surface ribonucleoprotein complex (CSRC). C10.36 binding to the CSRC leads to its lipid raft dependent internalization. Therefore, we examined if hnRNP U mediated C10.36 uptake led to significant changes in splicing. Total RNA was extracted from aptamer treated cells at 0, 24 and 48 hours post-treatment. The sequencing library was prepared with the Illumina TruSeq Stranded mRNA HT Sample Prep and subjected to HiSeq Rapid paired-end 100 bp plus sequencing on an Illumina HiSeq 2500 Ultra-High-Throughput Sequencing System. The raw FASTQ data were aligned against the human genome and transcriptome reference using the Illumina BaseSpace RNA-seq Alignment application using default stringencies and parameters. Alternative splicing was examined following mRNA sequencing and analysis using DEXseq².

[1292] We detected a global impact on splicing regulation specifically following C10.36 internalization compared to G24A after 24 hours of treatment (FIG. 25A). A significant portion of the alternatively splicing genes encode for poly(A) RNA binding proteins including C10.36 binding targets itself. See Table 55. Furthermore, a majority of the alternatively spliced exons were located in the 5′ and 3′ terminals of genes indicating differential usage of alternative polyadenylation (APA) sites following C10.36 treatment (FIG. 25B).

TABLE 55
Gene lists with alternatively spliced exons

| Comparison | Gene ID |
|---|---|
| 24 hr C10.36 vs | STUB1, PGAM5, EIF3B, SLC52A2, ZNF639, FKBP4, DIAPH1, TRIM28, YY1, |
| G24A | COPRS, FBRSL1, KLF13, HMG20B, IRAK1, DDX51, DEK, RBM38, BLK, CALR, |
| | CDV3, PITHD1, LARP4B, LARP1, SAPCD2, NPLOC4, TRAP1, MTDH, CYBA, |
| | LAMP1, TMEM248, SURF4, C17orf89, MYBL2, DUT, ATPAF1, WTAP, TFG, |
| | EZH2, SH2B2, PPM1G, MAZ, DAP, PSMD3, ATP5D, GBAS, SBF1, PRELID1, |
| | RPL8, SMC4, GUK1, METTL9, GCSH, RAD23B, CTSZ, SLBP, ACTB |
| 24 hr C10.36 vs | PGAM5, CALR, NME1-NME2, LDB1, ATXN2, PRPF19, RPL19, BRWD1, CDV3, |
| PBS | FAM83D, RPL27A, DUSP2, TTC3, GXYLT1, TOMM40, PLEC, TYMS, C9orf41, |
| | ADAR, NUDT4, SMEK1, KIAA0368, RTN4, MRPS26, LRPPRC, SMC4, GUK1, |
| | ZNF107, FBXO41, RAD23B, SSBP4, ABHD3, ITSN2, MFSD12, MTCH1, SRSF2, |
| | SELO, STK24, APLP2, RP9, SCAF8, RCC2, PDCD6, CLTB, LARP1, EIF5A, |
| | PPM1A, ANKRD11, CLASRP, TFG, FLII, RELB, C9orf69, EIF2AK1, DGKZ, |
| | NPLOC4, ENOPH1, CCDC88C, ARL5A, RAPGEF5, FBXW11, AKIRIN1, ST14, |
| | RANBP1, VPS4A, TMEM165, COPRS, RECQL4, TMEM259, UBP1, RMND5A, |
| | ID3, SPG7, DDX51, HNRNPL, MRPL23, RBM17, TMEM184B, C20orf112, |
| | TMEM248, SDF4, HEXDC, IMPDH1, EZH2, CSK, RNPS1, MAZ, FAM168B, RAF1, |
| | GATAD2A, TIMM50, SLC15A4, SLC3A2, PTDSS2, C1orf122, HDGF, HNRNPU, |
| | EMC8, SRSF9, PDE8A, DUS1L, C1QBP, MAP6D1, TNK2, HMG20B, PDE4A, |
| | KDM6B, TMUB1, CERK, EIF4G2, GRSF1, TRAP1, ALDH5A1, DNAJC2, E2F4, |
| | WASF1, ATP11C, YRDC, MYBL2, RPS2, NFKBIA, FUBP3, DUT, TMEM189, |
| | CECR5, BCL7A, SMARCD2, CBFB, THOP1, MALT1, GBAS, N4BP3, KRAS, |
| | AC093323.3, METTL9, DTX1, EHBP1L1, TTC39C, CRLS1, HNRNPM, SLC25A23, |
| | MCMBP, BZRAP1-AS1, SRRM2, PDCD2, RBM38, PIM3, WNK1, C19orf24, |
| | CDK17, MIR17HG, UBE2Z, PIEZO1, FOXK2, RCN2, CALM1, ITGB7, USP48, |
| | SIGMAR1, HMGA1, ITPR3, PHLPP2, ATP2A3, CLSTN1, CASC3, CTDP1, OGFR, |
| | PSMD3, ATMIN, HSP90B1, H2AFY, UBE2J2, MAP7D1, POLDIP2, EMD, PTP4A1, |
| | PTBP1, RUNX3, CHD4, TPRN, LONP1, TARBP1, MAN1A1, NCLN, COX5A, |
| | CDKN2A, SAPCD2, REPS1, LSM4, JUND, FBXO9, PPP1R14B, EBPL, |
| | COLGALT1, SULT1A1, PCYT2, TAF10, SOX12, FAM91A1, TRAK1, RASSF3, |
| | SCAF4, C9orf91, SLBP, CUX2, HNRNPAB, CD74, STK40, POLRMT, EML3, RPL8, |
| | CERS4, TOP2B, PITX1, CTSZ, ICMT, HTATSF1, CSNK1G2, STUB1, SNX5, |
| | WEE1, CRTAP, PTPRA, HNRNPUL1, FBRS, NSUN2, SAP30, CTDNEP1, SENP5, |
| | TNFAIP2, KHSRP, C1orf86, TRIM8, AP1M1, NT5C, MTHFD1L, ACADVL, |
| | MCM3AP, PANK2, GCSH, MARCKSL1, JTB, CENPA, BLMH, CUX1, YIF1A, |
| | NOP14, TXNDC11, NDUFB10, GFER, NFKB2, C7orf50, SAFB, FMNL1, RABEP1, |
| | GALNS, HEATR2, DEK, NIN, LEMD2, VAV2, C8orf82, SLC44A1, DYNLL2, |
| | SIPA1, TTBK2, HM13, RNF187, NR2F6, PABPC1, CAPRIN1, HTATIP2, TNRC18, |
| | USP22, YBX1, PABPC4, FPGS, BAX, RUNX1, FTL, UBE3A, IRAK1, MGRN1, |
| | PDIA3, FBXL6, DIAPH1, TRIM28, UBE2M, TNNI1, FBXO45, PKN1, TSPAN3, |
| | GTPBP3, C19orf43, IFRD2, GRB2, INTS1, ATAD3A, YBX3, PIAS2, GAK, GPS2, |
| | SERP1, UBA5, DICER1, PIGX, LSM14A, SLC25A25, RPUSD1, C7orf26, UBFD1, |
| | EI24, PALD1, UNC93B1, PTGES2, UBE2S, RPL28, UBE2O, PITPNM1, GLTSCR2, |
| | DMWD, PRELID1, GRAMD1A, SETD8, GTF2E2, TGIF2, ZNF48, SLAIN1, |
| | PWWP2A, HERPUD1, PTP4A2, FKBP4, FAM195A, EPN1, U2AF2, CMPK1, |
| | ERGIC1, TXNL4A, SLC38A10, LRRC14B, RP11-25K19.1, DAZAP1, SNRNP70, |
| | TUBA1B, MRPS2, PTPN11, ITM2B, CCND3, RNF31, PACSIN1, PSIP1, INPPL1, |
| | NADK, ATP5D, SEC14L1, TSC22D4, C4orf32, USP14, COMMD7, E2F1, ETS2, |
| | PDIA6, CUL4A, SET, OTUD5, IMPAD1, SOCS7, ZNF639, OPN3, CDK16, |
| | TUBGCP2, POM121, HLA-A, NXPH4, SREBF2, RP11-156P1.3, SF3A1, HMCES, |
| | MTA2, SH2B3, FBXO33, CIC, TSR3, RPS11, PPP1R9B, HNRNPA2B1, VAPA, |
| | NCOA5, SLC7A5, MSL1, MCAT, ABHD17B, RP5-991G20.1, DAP, ORAI1, TCF3, |
| | PIF1, RAC1, CLUH, WAC, ATXN2L, EIF3B, CAND1, MEX3C, UBN1, ERO1L, |
| | UBE2G1, LRIG1, TRPC4AP, CLASP2, AFG3L2, PKMYT1, APBB1IP, TLK2, |
| | YWHAQ, RAB2B, SNX25, HSPB1, CYBA, NACC1, SRRD, UBE2R2, DNM2, |
| | SSU72, ATAD3B, FAM129C, EIF4A3, NSMF, SLC25A39, DDR1, SH2B2, OTUD4, |
| | AHCTF1, ZNF511, GTF3A, CHAF1A, NAA10, RP11-108K14.4, HDGFRP2, PTPN9, |
| | SMARCD1, SIRT7, ACTB, C12orf75, FAM102A, FAM107B, PTEN, NFE2L3, RPL4, |
| | TRMT2A, TARSL2, CTD-2547E10.2, WRNIP1, SORL1, SLC52A2, SCARB1, |
| | MAPK1, H2AFV, BAZ1B, KLC1, ARID1B, QKI, KHDRBS1, ARMC10, TRABD, |
| | TSPAN17, LMBR1, GSTP1, RNF220, SMG7, CRK, CHTF8, KLF13, CHCHD10, |
| | SBF1, ACAP3, LRRC59, RBFOX2, MLEC, CARM1, YEATS2, GGA1, OSBP, UBB, |
| | GGA2, NSMCE4A, YY1, PPP1R12C, AES, PPP6R1, PTOV1, GSR, ZNF24, DYRK2, |
| | ACBD3, KDM1A, CDC25A, MRPS34, DNMT3B, FBXL19, E2F2, AMFR, BAG1, |
| | EIF5, MIF, CREG1, ATPAF1, ACSF3, KIAA1432, PARP1, HMHA1, C20orf24, |
| | YWHAH, MZT2A, HMGN1, BCL7B, KDSR, MBD3, CYFIP2, KLF16, AKAP8L, |
| | LRRFIP2, GNAS, AURKAIP1, PHC2, LARP4B, UBTF, AGAP2, RNF10, KIFC2, |
| | CLPTM1L, MPV17L2, CARS2, ATPIF1, ATP2A2, RFTN1, LAMP1, SPG21, |
| | DUSP22, GLUD1, ATP8A1, CYHR1, GTF2I, ABHD17A, SLC30A5, LRWD1, |
| | LETM1, PRKCD, C17orf89, KIAA0930, FTH1, BOP1, TRAF4, ARID1A, HMGN2, |
| | KTN1, OTUD7B, HNRNPA1, PRKAR2A, CUL3, PITPNA, RNASET2, PPIF, |
| | NTAN1, PFKL, PUS1, TMC8, DENND4B, LRRC8A, RB1, CDR2, PPM1G, MTMR1, |
| | ALYREF, MTDH, XBP1, ANKRD13A, PPP2R5A, FXN, STRN, P4HB, WTAP, |
| | DENND5B, PSPN, VCP, PFN1, SLC25A33, ZNF598, RNF126, RNF103, NOTCH2, |
| | PHYKPL, LRRFIP1, RCSD1, PCYT1A, BTBD1, MAP4K4 |
| 48 hr C10.36 vs | EIF3B, TM9SF3, TRIM28, ODC1, PPIF, HNRNPU, C1QBP, GNAS, RPL19, CDV3, |
| PBS | SRSF2, YBX3, GNB1, LARP1, TYMS, TOMM40, KHDRBS1, ATP2A2, CSK, |
| | WEE1, USP22, ATP5D, HNRNPAB, LRIG1, HDGF, SAPCD2, PTP4A2, ARID1A, |
| | PDIA3, SRSF9 |
| 24 hr vs 48 hr | YBX3, GNAS, UBC |
| PBS | |
| 24 hr PBS vs | FTL, PTMA, RPLP1, PDIA3, RPL13, HNRNPA2B1, FUS |
| 48 hr C10.36 | |
| 24 hr vs vs 48 hr | ETS1, SH3BP5, PGAM5, GLCCI1, PPP3R1, CALR, ZNF316, FBRSL1, ATXN2, |
| C10.36 | RAVER1, STRN, BLK, BEND4, CDV3, FAM83D, TOR3A, MYCBP2, MAP2K1, |
| | WHAMM, DUSP2, RPLP1, REPS1, SOBP, TOMM40, AGFG1, NUS1, RPLP0, |
| | TYMS, NPM1, ADAR, ARPC5L, SMEK1, SLCO3A1, CEP104, MRPS26, UBE2H, |
| | SNHG7, LRPPRC, SMC4, LRRK1, JADE2, GUK1, MYEF2, RAD23B, SSBP4, |
| | CTCF, ITSN2, IRS2, MFSD12, MTCH1, SRSF2, RANBP9, SELO, STT3B, ZNF800, |
| | AP2A1, STK24, APLP2, KIAA2013, HNRNPDL, SCAF8, SAMD1, RCC2, PDCD6, |
| | SMARCA5, ANKRD13B, LARP1, PAXBP1, RPN1, MAFK, ATXN10, EIF5A, |
| | IRF2BP2, RPL13, ANKRD11, CCNI, CLASRP, GOT2, TFG, GSK3A, VRK3, ERI3, |
| | C9orf69, PHLPP1, EIF2AK1, DGKZ, LYSMD2, NPLOC4, ENOPH1, C16orf72, |
| | ARL5A, ETNK1, RAPGEF5, INPP4A, FBXW11, E2F5, ST14, HPS1, RANBP1, |
| | VPS4A, TMEM165, COPRS, RECQL4, C12orf49, TMEM259, UBP1, RMND5A, |
| | KLF13, SPG7, DDX51, RP11-773D16.1, SCAF1, HNRNPL, AKR7A2, DGAT1, |
| | TAF15, MRPL23, RBM17, TMEM248, GAK, SDF4, ZBTB7A, HEXDC, NR6A1, |
| | DNAJC10, CTDP1, TMEM203, CSK, CREG1, SAP30L, MAZ, GIT1, FAM168B, |
| | TRIM11, GATAD2A, TIMM50, FAM53B, SLC3A2, PTDSS2, HDGF, HNRNPU, |
| | KLF6, EMC8, SRSF9, PDE8A, HMGN1, DUS1L, SMAP1, TNK2, HMG20B, |
| | PDE4A, TMUB1, SSNA1, DYRK1A, GPR160, RPL8, CERK, SUZ12P, EIF4G2, |
| | PGP, GRSF1, TRAP1, ALDH5A1, E2F4, WASF1, ATP11C, YRDC, MYBL2, |
| | AFG3L2, NFKBIA, FUBP3, DUT, NFATC3, MCCC2, CCM2, RPL18A, CCNL2, |
| | SMARCD2, MAML1, ABR, PREP, TLK2, MYO9B, UPF1, THOP1, PHF20L1, |
| | RRAS2, MALT1, GBAS, N4BP3, RTN4, AC093323.3, PPP1R2, METTL9, DTX1, |
| | PIAS4, TTC39C, CRLS1, WNT10A, HNRNPM, C3orf58, CYFIP2, TMEM184B, |
| | GSPT1, ATXN7L3, MCMBP, SH3GLB2, BZRAP1-AS1, KIAA0368, SRRM2, |
| | PDCD2, MRPL4, LAMC1, RBM38, WNK1, C19orf24, CDK17, TACC3, MIR17HG, |
| | ANKRD54, UBE2Z, PIEZO1, DVL3, EIF4A3, RCN2, GLTSCR2, CALM1, BTG1, |
| | TTC3, MAP4K3, USP48, SIGMAR1, GNB2, HMGA1, ATP2A3, CLSTN1, GTF2E2, |
| | MAF1, PSMD3, PAQR4, XPO6, FAM208B, PPP1CC, H2AFY, UBE2J2, DHX34, |
| | PTMA, MAP7D1, CARM1, POLDIP2, SH3GL1, EMD, ZMYM4, MICU2, MEF2D, |
| | PTP4A1, PTBP1, ALDOA, DOHH, CNR1, RUNX3, MSH3, CHD4, TPRN, IMP4, |
| | LONP1, TARBP1, MAN1A1, PDIA4, NCLN, RUFY1, ZFAND5, ANKS6, PITHD1, |
| | SAPCD2, EHBP1L1, PXMP2, C9orf40, LSM4, JUND, CLIC4, ARL8B, PPP1R14B, |
| | COX5A, DONSON, EBPL, FBXO41, TAF10, SOX12, FAM91A1, JDP2, TRAK1, |
| | RASSF3, TOP1, SCAF4, UBALD2, YIPF4, C9orf91, MAP3K3, CUX2, BRI3BP, |
| | HNRNPAB, SQSTM1, POLRMT, ANP32B, TMPO, KDM6B, PITX1, POM121C, |
| | CTSZ, ICMT, HTATSF1, CSNK1G2, STUB1, SNX5, WEE1, HOOK2, ALG3, |
| | PTPRA, HNRNPUL1, STARD7, P2RY8, FZR1, FBRS, APEH, NSUN2, SAP30, |
| | SMARCC1, TNFAIP2, KHSRP, RGCC, EIF2AK3, AP1M1, NT5C, MAP4, |
| | MTHFD1L, EPB41, BCR, MCM3AP, CBFB, TBC1D4, GPCPD1, USP24, LTBP4, |
| | CENPA, BLMH, SDCCAG3, CUX1, NUP210, ELAVL1, NOP14, TXNDC11, |
| | TM7SF3, GFER, PDS5A, GRK6, ATMIN, CARS2, C7orf50, SAFB, CKAP4, |
| | FMNL1, FCHO1, RAB11FIP2, EHMT1, SEH1L, TFDP1, HEATR2, ARIH1, CMPK1, |
| | HIATL1, DEK, NIN, LEMD2, GCSH, ADPGK, SLC44A1, ARHGEF1, TNRC18, |
| | RFK, SIPA1, HM13, RNF187, MAPK14, FEM1B, ASXL1, NR2F6, CAPRIN1, ADA, |
| | EMB, IPO5, HTATIP2, MARCKSL1, CIZ1, FOXO1, USP22, LRFN4, YBX1, |
| | PABPC4, FPGS, BAX, SLBP, UBE2J1, ADNP, UBE3A, IRAK1, PDIA3, DIAPH1, |
| | TRIM28, UBE2M, TNNI1, CABLES1, PKN1, NCOR2, PKD1, GADD45GIP1, |
| | TSPAN3, GTPBP3, C19orf43, IFRD2, GRB2, PPP1R3E, TBC1D1, NMD3, ATAD3A, |
| | YBX3, GNB1, FBXL18, ATP11B, TOPBP1, GPS2, SERP1, RAF1, PIGX, LSM14A, |
| | ZMYND19, ZNRF2, RPUSD1, UBFD1, EI24, PALD1, URI1, VGLL4, PTGES2, |
| | UBE2S, UBE2O, NFKB1, DMWD, NT5DC2, PRELID1, SETD8, SLC25A3, |
| | MARK3, SLAIN1, PWWP2A, ABCC1, HERPUD1, PTP4A2, TARSL2, PAWR, |
| | ZNF318, TM9SF3, FKBP4, ODC1, NCL, PSMD2, EPN1, U2AF2, CTD-2547E10.2, |
| | MSANTD3, SURF4, ERGIC1, TXNL4A, MAPK11, DAZAP1, SNRNP70, MRPS2, |
| | CHCHD2, PTPN11, ITM2B, TPGS2, SRF, CCND3, AP5B1, C19orf10, PACSIN1, |
| | PSIP1, INPPL1, NADK, SIAH2, ATP5D, UHRF1, C4orf32, USP14, COMMD7, |
| | E2F1, ETS2, VAV2, CUL4A, CLTA, SET, OTUD5, IMPAD1, SLC52A2, ZNF639, |
| | FYN, PGLS, CDK16, ARSB, HLA-A, NXPH4, RABEP1, RP11-156P1.3, FKBP2, |
| | PDCD7, SF3A1, HMCES, MTA2, SH2B3, PAQR3, UBTD2, CIC, KCNK12, |
| | SLC25A1, SH3KBP1, MCUR1, BOP1, PPP1R9B, C17orf89, PANK3, VAPA, |
| | FAM173A, SLC7A5, MSL1, MCAT, ABHD17B, CDC16, TMEM123, PYURF, |
| | VOPP1, ATL3, DAP, ORAI1, TCF3, HEATR3, XXYLT1, NUDT19, PIF1, CRELD2, |
| | RAC1, CLUH, DDX17, RRM2, C19orf52, WAC, ATXN2L, EIF3B, CAND1, |
| | MEX3C, UBN1, SMIM13, ERO1L, FDX1, C1QBP, LRIG1, RPS2, PKMYT1, |
| | APBB1IP, SMAP2, SYNGR3, YWHAQ, SNX25, CCNA2, TTYH3, HSPB1, CYBA, |
| | SRRD, FAM21C, UBE2R2, DNM2, C8orf82, OSGIN2, SSU72, ATAD3B, RER1, |
| | DLG1, PHB2, RRP36, SLC25A39, SH2B2, OTUD4, RPP25, GRINA, AHCTF1, |
| | ZNF511, MIB1, GTF3A, CHAF1A, NAA10, PTPN9, ST3GAL2, SETD6, GARS, |
| | SIRT7, C12orf75, FAM102A, FBXO45, PTEN, NFE2L3, ASB1, DESI2, CHPT1, |
| | SLC9A3R1, EDC4, WRNIP1, SORL1, PRKAR2B, SCARB1, MAPK1, H2AFV, |
| | AKIRIN1, BAZ1B, KLC1, ARID1B, UVRAG, SMARCA4, ATF5, QKI, KHDRBS1, |
| | ARMC10, MCM2, TSPAN17, LMBR1, C16orf13, RNF220, FUCA2, CRK, CHTF8, |
| | UBE2G1, CHCHD10, SBF1, ARHGAP23, C12orf23, ACAP3, SREBF2, CDC34, |
| | MLEC, FAM193B, SLC25A36, EGLN1, BMP7, MAP4K2, CHST10, UQCRFS1, |
| | GGA2, UBR5, YY1, SRSF6, EHD1, AES, PPP6R1, PTOV1, GSR, TMEM201, |
| | ADCK2, KDM1A, CDC25A, MRPS34, DNMT3B, FBXL19, E2F2, MAPKAPK5, |
| | AMFR, BAG1, EIF5, SCAP, INSIG1, VPS26B, ATPAF1, IRF8, NSMCE4A, PARP1, |
| | C20orf24, RAI1, TNKS2, YWHAH, MZT2A, TNKS, CANX, KDSR, UBE2Q2, |
| | ANXA11, ATG3, KLF16, PIM3, ESRRA, CAMSAP1, LRRFIP2, SUDS3, RALY, |
| | GNAS, TSEN15, AURKAIP1, CTDNEP1, MAP2K2, TTC7A, LARP4B, UBTF, |
| | FAM195A, CUL3, RNF10, C17orf67, MBD2, MBOAT7, TRIM24, KIFC2, CPNE2, |
| | CLPTM1L, KIF5B, LPCAT1, NFKB2, ATPIF1, ATP2A2, PTGES3, PPTC7, IFNGR2, |
| | LAMP1, CNOT11, MCM4, SPG21, DUSP22, PPP1R12C, GLUD1, CYHR1, LMNB1, |
| | GTF2I, ABHD17A, MKI67, SLC30A5, C17orf62, LRWD1, LETM1, PRKCD, |
| | KIAA0930, FTH1, STRBP, AKIRIN2, ZBTB44, TRAF4, ARID1A, KREMEN2, |
| | SMAD3, ESYT2, RLTPR, PRKAR2A, RCCD1, JTB, PITPNA, TSR3, PPIF, SFPQ, |
| | PFKL, MRPS5, PUS1, TMC8, DENND4B, TUFM, RBI, LRP8, PPM1G, AGPAT2, |
| | CYC1, ALYREF, MTDH, BRD2, XBP1, ANKRD13A, PPP2R5A, INSR, FXN, EZH2, |
| | P4HB, WTAP, DENND5B, GLS, ALKBH7, AVEN, ECI1, VCP, EEFSEC, TP53BP2, |
| | PFN1, ZNF598, MAP2K3, RNF126, ZNF385B, LRRFIP1, DDI2, RCSD1, TMEM245, |
| | NOM1, FAM129C, SLC25A33, BTBD1, MAP4K4, MTA1 |
| 0 hr vs 24 hr | RAB22A, CALR, STX2, PTPN4, CDV3, RPL27A, PARP6, TTC3, TOMM40, PLEC, |
| C10.36 | NUS1, CHRAC1, UBE2Q1, C9orf41, SMEK1, SLCO3A1, KLHL36, SMC4, LRRK1, |
| | JADE2, GUK1, FBXO41, RAD23B, SSBP4, CTCF, MAP2K4, ITSN2, ALG3, |
| | MTCH1, SRSF2, SELO, ZNRF2, STK24, APLP2, RCC2, SAPCD2, LARP1, EIF5A, |
| | RPL13, ANKRD11, SNRNP70, GSK3A, ERI3, C9orf69, EIF2AK1, DGKZ, PPP2CB, |
| | NPLOC4, CCDC88C, WAC, INPP4A, FBXW11, E2F5, SRSF9, RANBP1, VPS4A, |
| | TMEM165, COPRS, C20orf24, C5orf24, TMEM259, UBP1, KLF13, SPG7, DDX51, |
| | TMEM201, HNRNPL, AKR7A2, DGAT1, MRPL23, RBM17, TMEM248, URGCP, |
| | SDF4, HEXDC, NCOR1, VCP, USF2, ABI2, MAZ, GIT1, SLC15A4, HDGF, BRPF3, |
| | EMC8, BCAS4, PDE8A, DUS1L, C1QBP, TNK2, HMG20B, HNRNPU, ITPR3, |
| | TMUB1, CERK, EIF4G2, GRSF1, TRAP1, E2F4, RPL10, OGFR, ADRBK1, MYBL2, |
| | AFG3L2, NFKBIA, FUBP3, DUT, SMARCD2, CBFB, ABR, MYO9B, UPF1, |
| | FOXRED2, GBAS, RPL28, DTX1, MAPK12, RPS6KA1, CRLS1, WNT10A, SLBP, |
| | TMEM184B, ATXN7L3, MCMBP, SH3GLB2, SRRM2, PDCD2, RBM38, PIM3, |
| | WNK1, C19orf24, ANKRD54, PIEZO1, DVL3, CYBA, RCN2, CALM1, SIGMAR1, |
| | GNB2, NACC1, WASF1, ATP2A3, RPL26, CTDP1, PSMD3, HNRNPUL1, ATMIN, |
| | UBE2J2, PTMA, MAP7D1, EMD, PTP4A1, LONP1, GNAS, MAN1A1, PDIA4, |
| | NCLN, RUFY1, GTF2E2, PITHD1, ATP13A2, REPS1, LSM4, TYMS, EBPL, |
| | PCYT2, TAF10, SOX12, RASSF3, EHBP1L1, UBALD2, SLC25A39, GOLPH3, |
| | ABHD3, C16orf72, MGAT4B, STK40, DVL1, RPL8, TOP2B, PITX1, CTSZ, ICMT, |
| | CSNK1G2, STUB1, WEE1, MFAP4, CRTAP, PTPRA, DDX5, FBRS, EZH2, NSUN2, |
| | CTDNEP1, KHSRP, AP1M1, MTHFD1L, MCM3AP, VAV2, GPCPD1, ZDHHC5, |
| | TNRC18, CUX1, NOP14, GFER, GRK6, NFKB2, C7orf50, CKAP4, FMNL1, TFDP1, |
| | HEATR2, LEMD2, GCSH, ADPGK, FAM129C, SIPA1, METTL9, RNF187, NR2F6, |
| | PABPC1, CAPRIN1, HTATIP2, OGFRL1, USP22, MBD2, RMI2, PABPC4, FPGS, |
| | HMGN2, IRAK1, SRM, PDIA3, ILKAP, FBXL6, DIAPH1, TRIM28, UBE2M, PKN1, |
| | NCOR2, GADD45GIP1, GTPBP3, C19orf43, C9orf16, GRB2, ATAD3A, YBX3, |
| | PIAS2, GAK, SERP1, PIGX, ZMYND19, RPUSD1, EI24, PALD1, PLCG2, PTGES2, |
| | UBE2S, LRWD1, UBE2O, GLTSCR2, PRELID1, ACTG1, TGIF2, HNRNPAB, |
| | SLAIN1, BOP1, PTP4A2, PAWR, BTBD1, FAM195A, PSMD2, EPN1, CMPK1, |
| | ERGIC1, TXNL4A, ST6GAL1, DAZAP1, SLC35E1, ITM2B, SRF, CCND3, |
| | C19orf10, NUPL1, SIAH2, ATP5D, LONRF1, C4orf32, LRIG1, E2F1, ETS2, |
| | CUL4A, HNRNPH1, WDR34, SET, OTUD5, IMPAD1, CCDC109B, SOCS7, |
| | ZNF639, FYN, RPS2P5, POM121, HLA-A, NXPH4, SREBF2, PDCD7, SF3A1, |
| | HMCES, MTA2, SH2B3, FBXO33, PAQR3, CIC, SLC25A1, MCUR1, LAMP1, |
| | PPP1R9B, C17orf89, PITPNA, SLC7A5, MSL1, ABHD17B, PYURF, NAGLU, |
| | TCF3, PIF1, RNPEPL1, RAC1, CLUH, RAPGEF5, ATXN2L, EIF3B, RPS24, |
| | ERO1L, UBE2G1, CLASP2, RPS2, PKMYT1, YWHAQ, HSPB1, EIF4A3, HMGA1, |
| | CLSTN1, DNM2, C8orf82, OSGIN2, SSU72, DLG1, RRP36, C9orf91, SH2B2, |
| | ADCY3, OTUD4, GRINA, NFE2L2, AHCTF1, UBQLN1, SEL1L3, GTF3A, |
| | CHAF1A, NAA10, FAM102A, FBXO45, SMIM13, NFE2L3, RPL4, SLC9A3R1, |
| | ARF6, CTD-2547E10.2, SORL1, SLC52A2, DMWD, COMMD7, H2AFV, AKIRIN1, |
| | KLC1, QKI, KHDRBS1, ARMC10, MCM2, OGFOD3, TSPAN17, LMBR1, CHTF8, |
| | SUN2, SBF1, SLC36A4, AMFR, MLEC, CHCHD10, MBOAT7, YY1, PPP1R12C, |
| | FTH1, PPP6R1, PTOV1, GSR, KDM1A, CDC25A, TRIP13, MRPS34, DNMT3B, |
| | CDC34, BAG1, ACAP2, EIF5, MIF, CREG1, ATPAF1, PPP1R35, DPH7, RECQL4, |
| | UBE2H, MZT2A, HMGN1, CANX, KLF16, AKAP8L, ESRRA, KHNYN, RALY, |
| | TARBP1, AURKAIP1, LARP4B, CUL3, CPXM1, TRIM24, KIFC2, CPNE2, |
| | CLPTM1L, YBX1, CARS2, ATP2A2, SPG21, LMNB1, GTF2I, PBRM1, LETM1, |
| | PRKCD, TRAF4, ARID1A, OTUD7B, ESYT2, RLTPR, JTB, TSR3, PPIF, PFKL, |
| | NUDT19, PUS1, RB1, PPM1G, CYC1, ALYREF, MTDH, MKNK2, XBP1, |
| | ANKRD13A, CARM1, STRN, P4HB, WTAP, LMNB2, TNKS2, ECI1, CSK, |
| | MAP2K3, RNF126, LRRFIP1, RCSD1, SLC25A33, MTA1 |

### REFERENCES

[1293] 1. Xiao R, et al. (2012). Nuclear Matrix Factor hnRNP U/SAF-A Exerts a Global Control of Alternative Splicing by Regulating U2 snRNP Maturation. Mol Cell.
[1294] 2. Anders, S, et al. (2012). Detecting differential usage of exons from RNA-seq data. Genome Res.

### Example 43: C10.36 Treatment Induces Necrosis in Ramos Cells

[1295] In this Example, we further investigated the mechanism of C10.36 mediated loss in viability. First we examined if C10.36 treatment lead to caspase mediated apoptosis. For this C10.36 treated protein lysates were probed for the presence of cleaved caspase 3 and its downstream target, cleaved PARP. Unlike doxorubicin treatment which causes canonical apoptosis, C10.36 did not result in increased levels of cleaved caspase 3 or PARP (FIG. 26A). To test for caspase independent apoptosis we tested for Annexin V positive staining using Annexin V (marker for apoptosis) and SYTOX Orange (marker for loss of membrane integrity). In C10.36 treated cells, 98% of the Annexin V positive cells also displayed SYTOX positivity which indicates dead cells. Only about 2% of C10.36 treated cells showed Annexin V positive and SYTOX negative staining indicative of late apoptosis (FIG. 26B). We next tested if C10.36 treatment led to an increase in autophagy mediated cell death. Autophagy initiation leads to accumulation of lysosomes which can be tracked by a lysotracker probe. Upon aptamer treatment, cells were collected and incubated with the lysotracker probe and imaged by confocal microscopy. C10.36 treatment did not lead to a significant difference in the accumulation of lysosomes whereas clear accumulation of lysosomes was observed in the positive control sample (FIG. 26C). Overall lysotracker signal was more diffuse in cells upon C10.36 treatment indicating a cytoplasmic localization rather than contained vesicular localization. This is suggestive of lysosome membrane permeabilzation (LMP). We also observed close resemblance in the morphological changes to necrotic cells; particularly bleb formation in C10.36 treated Ramos cells (FIG. 26D). The lack of evidence indicating C10.36 mediated apoptotic cell death combined with the presence of dual STYOX and Annexin V staining and the necrotic morphology indicate that C10.36 treatment leads to a loss in viability though necrotic cell death. Cell death vs loss of proliferation was also confirmed by cell cycle analysis and EdU incorporation in which no change was detected upon C10.36 treatment.

### Example 44: C10.36 Binding and Internalization Play a Role in Cell Death

[1296] Preferential binding and sensitivity of different NHL cell lines to C10.36 was also assessed. Both Ramos 2G6.4 C10 and MEC1 cells showed highest level of binding to C10.36. However unlike Ramos 2G6.4 C10, MEC1 cells were not sensitive to cell killing by the aptamer. Therefore we tested if MEC1 cells internalize C10.36 upon binding by confocal microscopy. Unlike the sensitive Ramos 2G6.4 C10 which internalize the aptamer, MEC1 cells do not (FIG. 27A). Similarly, SUDHL-1 cells which are sensitive to C10.36 internalize the aptamer (FIG. 27B). Finally, a monoclonal antibody to hnRNP U that was not internalized did not affect Ramos cell proliferation (FIG. 27D), unlike C10.36 under similar conditions (FIG. 27C).

[1297] The above results indicate that binding and internalization are both required for sensitivity to C10.36.

### Example 45: C10.36-Nanoparticle Internalization

[1298] In this Example, we constructed a nanoparticle-aptamer conjugate and demonstrate that this construct is internalized within the target cells. Such construct can be used to deliver payload with the cells.

[1299] Fluorescent silica nanoparticles (green) functionalized with carboxyl groups on the particle surface for covalent binding to amine containing molecules (30 nm Sicastar®-greenF COOH, Micromod Partikeltechnologie GmbH) were conjugated with 5′C6amine-C10.36-3′TEX615 aptamer (red) or the scrambled version of the aptamer 5′C6amine-C10.36scr-3′TEX615 (red) to make a C10.36-fluorescent nanoparticle conjugate (yellow). 5′C6amine-C10.36-3′TEX615 is C10.36 modified as indicated and the corresponding nanoparticle may be referred to hereis as “Nanoparticle-C10.36” or similar variants. 5′C6amine-C10.36scr-3′TEX615 is a negative control with a scrambled C10.36 aptamer sequence and the corresponding nanoparticle may be referred to hereis as “Nanoparticle-C10.36scr” or similar variants. Sequences are shown in Table 56. Conjugated and unconjugated nanoparticles were quenched with 1% BSA for an hour after coupling and were stored in 1% BSA-PBS. Binding to Ramos cells was done in PBS at 37° C. for 30 min to allow internalization and the C10.36 conjugated nanoparticle immunofluorescence (yellow) was detected by confocal microscopy.

TABLE 56
Sequences of nanoparticle conjugates

| | SEQ | |
|---|---|---|
| | ID | |
| Name | NO. | Sequence |
| 5′ C6 amine- | 4357 | /5AmMC6/CT AAC CCC GGG TGT GGT |
| C10.36- | | GGGG TGG GCA GGG GG TTA |
| 3′TEX615 | | G/3TEX615/ |
| 5′C6 amine- | 4408 | /5AmMC6/CTA ACC GGG TCC ACG ATC |
| C10.36scr- | | GTG GGA CGG ACT GTG |
| 3′TEX615 | | GAC/3TEX615/ |

[1300] Results are shown in FIGS. 28A-C. In the figures the circular shapes are blue stained nuclei. FIG. 28A shows Ramos cells contacted with Nanoparticle-C10.36, FIG. 28B shows Ramos cells contacted with Nanoparticle-C10.36scr control particles, and FIG. 28C shows Ramos cells contacted with unconjugated control nanoparticles. The bright area in FIG. 28A shows C10.36 conjugated nanoparticle. In contrast, such signal is not observed with the scrambled control aptamer (FIG. 28B) or with a no aptamer control particle (FIG. 28C).

### Example 46: Characterization of C10.36-Resistant Ramos Cells

[1301] As shown in the data above, cellular binding by C10.36 alone may not lead to cellular death. Internalization also plays a role. For example, the proliferation of MEC1 cells was not influenced by C10.36 or G24A (FIG. 20F), although the cell line is bound by the aptamer to comparable high levels (FIG. 23F). This observation indicates that binding alone of C10.36 does not necessarily lead to an impact on cell proliferation. In line with this notion, we observed some late passages (>40) of Ramos cells that became C10.36-resistant. Inhibition of the viability of these resistant Ramos cells by the aptamer is still observable, but to a much lesser extent. See FIG. 29A; compare to sensitive Ramos cells in FIG. 20A. The resistant cells from these passages still bound to C10.36 comparably high as found for the sensitive Ramos passages, as observed using flow cytometry experiments (data not shown). However, uptake into resistant Ramos was strongly diminished. See FIG. 29B; compare to sensitive Ramos cells in FIG. 24A. In turn, the sensitive Ramos 2G6.4 C10 and SU-DHL-1 cells show a strong uptake of C10.36, whereas MEC1 cells do not (FIG. 27A).

[1302] Immunoprecipitation (pulldown) of C10.36 bound protein complexes and subsequent protein identification using mass spectrometry were performed as above. See FIG. 23B and related discussion. FIG. 29C shows results of affinity-purification with C10.36 of Ramos cells sensitive to C10.36 (“Ramos s”) or the resistant Ramos cells (“Ramos r”). Jurkat cells, which are not sensitive to C10.36 (FIG. 20D), are also shown. Differential proteins detected in Ramos cells sensitive versus resistant to C10.36 are shown in Table 57 and Table 58.

TABLE 57
Proteins significantly enriched in Ramos
sensitive but not resistant to C10.36

| ID | Description |
|---|---|
| Q9BXY5 | Calcyphosin-2 |
| Q00839 | Heterogeneous nuclear ribonucleoprotein U |
| Q15233 | Non-POU domain-containing octamer-binding protein |
| Q9NR30 | Nucleolar RNA helicase 2 |
| P09874 | Poly [ADP-ribose] polymerase 1 |
| P0CG47 | Polyubiquitin-B |
| O43390 | heterogeneous nuclear ribonucleoprotein r |
| P08727 | Keratin, type 1 cytoskeletal 19 |

TABLE 58
Proteins significantly enriched in Ramos
resistant but not sensitive to C10.36

| ID | Description |
|---|---|
| P10809 | 60 kDa heat shock protein, mitochondrial |
| P11021 | 78 kDa glucose-regulated protein |
| P57053 | Histone H2B type F-S |
| P29692 | Isoform 2 of Elongation factor 1-delta |
| Q9Y265 | RuvB-like 1 |
| P25705 | Isoform 2 of ATP synthase subunit alpha, mitochondrial |
| P35232 | Prohibitin |
| Q99623 | Prohibitin-2 |

[1303] As noted, the entire protein content from the gels shown in FIG. 29C was excised from the gel, digested, and analysed by LC-MS/MS. This analysis revealed 34 specific proteins identified by aptamer based pull-down experiments using sensitive Ramos cells, the majority of which are found to be ribonucleoproteins. See FIG. 29D. The figure shows a STRING interaction network map (Szklarczyk et al. Nucleic Acids Res. 2015 43(Database issue):D447-5) of affinity purified targets unique to C10.36 sensitive Ramos cells vs Jurkat cells identifies ribonucleoprotein splicing complexes on the surface of Ramos cells. Targets circled in gray/green were confirmed to be on the cell surface with biotin surface labeling independent of aptamer binding. These proteins were not found in pull-down experiments using G24A or Jurkat cells. InterologFinder [Wiles et al., Building and Analyzing Protein Interactome Networks by Cross-species Comparisons. BMC Systems Biology 2010, 4:36] reveals that the identified proteins putatively form a multicomponent complex (FIG. 29D) and Gene Ontology (GO) enrichment analysis shows that their biological function is associated with RNA metabolism, mRNA processing, and alternative splicing. See Table 59, which indicates proteins are involved in ribonucleoprotein complex (GO.0030529) and spliceosomal complex (GO.0005681) according to GO cellular component classification.

TABLE 59
Proteins significantly enriched in sensitive Ramos versus Jurkat

| UniProt | Name | ID | GO Cellular Component |
|---|---|---|---|
| P19338 | Nucleolin | NCL | Ribonucleoprotein |
| P62805 | histone H4 | HIST1H4H | |
| P22626 | heterogeneous nuclear ribonucleoprotein A2/B1 | HNRNPA2B1 | Ribonucleoprotein; |
| | | | spliceosomal |
| P57053 | Histone H2B type F-S | | |
| P09651 | Heterogeneous nuclear ribonucleoproteins A1 | HNRNPA1 | Ribonucleoprotein; |
| | | | spliceosomal |
| P16401 | Histone H1.5 | HIST1H1B | |
| P11021 | 78 kDa glucose-regulated protein | HSPA5 | |
| P10809 | 60 kDa heat shock protein, mitochondrial | HSPD1 | |
| Q9NR30 | Nucleolar RNA helicase 2 | DDX21 | |
| P60709 | Actin, cytoplasmic 1 | ACTB | Ribonucleoprotein |
| P01871 | Ig mu chain C region | | |
| Q12906 | Isoform 4 of Interleukin enhancer-binding factor | ILF3 | Ribonucleoprotein |
| | 3 | | |
| P38159 | RNA-binding motif protein, X chromosome | RBMX | Ribonucleoprotein; |
| | | | spliceosomal |
| Q96PK6 | RNA-binding protein 14 | RBM14 | Ribonucleoprotein |
| Q9UKM9 | Isoform 1 of RNA-binding protein Raly | RALY | Ribonucleoprotein; |
| | | | spliceosomal |
| P62318 | small nuclear ribonucleoprotein sm d3 | SNRPD3 | Ribonucleoprotein; |
| | | | spliceosomal |
| P55769 | NHP2-like protein 1 | NHP2L1 | Ribonucleoprotein; |
| | | | spliceosomal |
| P30050 | 60S ribosomal protein L12 | RPL12 | Ribonucleoprotein |
| P04406 | glyceraldehyde-3-phosphate dehydrogenase | GAPDH | Ribonucleoprotein |
| P0CG47 | Polyubiquitin-B | UBB | |
| Q01844 | RNA-binding protein EWS | EWSR1 | |
| P37108 | Signal recognition particle 14 kDa protein | SRP14 | Ribonucleoprotein |
| P09874 | Poly [ADP-ribose] polymerase 1 | PARP1 | |
| Q99729 | Isoform 2 of Heterogeneous nuclear | HNRNPAB | Ribonucleoprotein |
| | ribonucleoprotein A/B | | |
| P11940 | Polyadenylate-binding protein 1 | PABPC1 | Ribonucleoprotein; |
| | | | spliceosomal |
| P35637 | RNA-binding protein FUS | FUS | Ribonucleoprotein |
| Q15233 | Non-POU domain-containing octamer-binding | NONO | |
| | protein | | |
| Q13151 | Heterogeneous nuclear ribonucleoprotein A0 | HNRNPA0 | Ribonucleoprotein |
| Q00839 | Heterogeneous nuclear ribonucleoprotein U | HNRNPU | Ribonucleoprotein; |
| | | | spliceosomal |
| Q9NZI8 | Insulin-like growth factor 2 mRNA-binding | IGF2BP1 | |
| | protein 1 | | |
| P22087 | rRNA 2′-O-methyltransferase fibrillarin | FBL | Ribonucleoprotein |
| P29692 | Isoform 2 of Elongation factor 1-delta | EEF1D | |
| Q9Y265 | RuvB-like 1 | RUVBL1 | |
| P35268 | 60S ribosomal protein L22 | RPL22 | Ribonucleoprotein |
| P52272 | Heterogeneous nuclear ribonucleoprotein M | HNRNPM | Ribonucleoprotein; |
| | | | spliceosomal |
| P61978 | Isoform 2 of Heterogeneous nuclear | HNRNPK | Ribonucleoprotein; |
| | ribonucleoprotein K | | spliceosomal |
| Q9BY77 | Polymerase delta-interacting protein 3 | POLDIP3 | |
| P10412 | Histone H1.4 | HIST1H1E | |
| P16401 | Histone H1.5 | HIST1H1B | |
| P62316 | Small nuclear ribonucleoprotein Sm D2 | SNRPD2 | Ribonucleoprotein; |
| | | | spliceosomal |
| P0C0S8 | histone H2A type 1 | HIST1H2AK | |
| Q8IUE6 | Histone H2A type 2-B | HIST2H2AB | |
| Q9UMS4 | Pre-mRNA-processing factor 19 | PRPF19 | Ribonucleoprotein; |
| | | | spliceosomal |
| Q14103 | Isoform 2 of Heterogeneous nuclear | HNRNPD | Ribonucleoprotein |
| | ribonucleoprotein D0 | | |
| Q04837 | Single-stranded DNA-binding protein, | SSBP1 | |
| | mitochondrial | | |
| P23396 | 40S ribosomal protein S3 | RPS3 | Ribonucleoprotein |
| O43390 | heterogeneous nuclear ribonucleoprotein r | HNRNPR | Ribonucleoprotein; |
| | | | spliceosomal |
| P62750 | 60S ribosomal protein L23a | RPL23A | Ribonucleoprotein |
| Q9BXY5 | Calcyphosin-2 | CAPS2 | |
| P11142 | Heat shock cognate 71 kDa protein | HSPA8 | Ribonucleoprotein; |
| | | | spliceosomal |

### Example 47: C10.36 Binds Human Lymphoma Cells

[1304] In this Example, we used confocal microscopy to examine binding of aptamer C10.36 to peripheral blood mononuclear cells (PBMCs) from human patients. FIG. 30 shows binding of C10.36 or the scrambled C10.36scr control (Example 45) to human peripheral blood mononuclear cells (PBMCs). As indicated in the figure, the cells were from PBMCs controls or PBMCs from non-Hodgkin's lymphoma (NHL) patients. The percentages indicated correspond to the number of cells with aptamer staining by visual inspection. C10.36 bound the NHL samples at much higher levels than normals.

[1305] Although preferred embodiments of the present invention have been shown and described herein, it will be obvious to those skilled in the art that such embodiments are provided by way of example only. Numerous variations, changes, and substitutions will now occur to those skilled in the art without departing from the invention. It should be understood that various alternatives to the embodiments of the invention described herein may be employed in practicing the invention. It is intended that the following claims define the scope of the invention and that methods and structures within the scope of these claims and their equivalents be covered thereby.

The application's sequence listing, which the Patent Office published only in electronic form, follows.

SEQUENCE LISTING (4409 sequences)

SEQ ID NO: 1 - DNA, 32 bp, Artificial Sequence
  Synthetic oligonucleotide
ccccccgaatcacatgacttgggcgggggtcg

SEQ ID NO: 2 - DNA, 32 bp, Artificial Sequence
  Synthetic oligonucleotide
accggatagcggttggaggcgtgctccactcg

SEQ ID NO: 3 - DNA, 32 bp, Artificial Sequence
  Synthetic oligonucleotide
ccgcgcagatatacaacgtacctctgtgcgca

SEQ ID NO: 4 - DNA, 70 bp, Artificial Sequence
  Synthetic oligonucleotide
atccagagtgacgcagcagtcttttctgatggacacgtggtggtctagtatctggacacggtggcttagt

SEQ ID NO: 5 - RNA, 70 nt, Artificial Sequence
  Synthetic oligonucleotide
auccagagugacgcagcagucuuuucugauggacacgugguggucuaguaucacuaagccaccgugucca

SEQ ID NO: 6 - DNA, 32 bp, Artificial Sequence
  Synthetic oligonucleotide
ctgtgaggcgtactgcggtgagcctctcatta

SEQ ID NO: 7 - DNA, 26 bp, Artificial Sequence
  Synthetic oligonucleotide
caattgggcccgtccgtatggtgggt

SEQ ID NO: 8 - RNA, 80 nt, Artificial Sequence
  Synthetic oligonucleotide
  misc_feature (16)..(55): n is a, c, g, or u
gggaggacgaugcggnnnnnnnnnnnnnnnnnnnnnnnnnnnnnnnnnnnnnnnncagacgacucgcugaggauccgaga

SEQ ID NO: 9 - RNA, 15 nt, Artificial Sequence
  Synthetic oligonucleotide
gggaggacgaugcgg

SEQ ID NO: 10 - RNA, 25 nt, Artificial Sequence
  Synthetic oligonucleotide
cagacgacucgcugaggauccgaga

SEQ ID NO: 11 - RNA, 40 nt, Artificial Sequence
  Synthetic oligonucleotide
cgcgucuuccccgcauugccgcaauugccauacauuaaua

SEQ ID NO: 12 - DNA, 40 bp, Artificial Sequence
  Synthetic oligonucleotide
cgcgtcttccccgcattgccgcaattgccatacattaata

SEQ ID NO: 13 - RNA, 40 nt, Artificial Sequence
  Synthetic oligonucleotide
guccggaacgccucgauccucgcauaauaugauacgucug

SEQ ID NO: 14 - DNA, 40 bp, Artificial Sequence
  Synthetic oligonucleotide
gtccggaacgcctcgatcctcgcataatatgatacgtctg

SEQ ID NO: 15 - RNA, 40 nt, Artificial Sequence
  Synthetic oligonucleotide
guccaugguacgccucgauuccgcccauacaugcauguaa

SEQ ID NO: 16 - DNA, 40 bp, Artificial Sequence
  Synthetic oligonucleotide
gtccatggtacgcctcgattccgcccatacatgcatgtaa

SEQ ID NO: 17 - RNA, 40 nt, Artificial Sequence
  Synthetic oligonucleotide
cacuauccguuuguccguccucuugugguauugcgcaugc

SEQ ID NO: 18 - DNA, 40 bp, Artificial Sequence
  Synthetic oligonucleotide
cactatccgtttgtccgtcctcttgtggtattgcgcatgc

SEQ ID NO: 19 - RNA, 40 nt, Artificial Sequence
  Synthetic oligonucleotide
ucuuccaucuggucgcgauacagaauacgauuaacauaaa

SEQ ID NO: 20 - DNA, 40 bp, Artificial Sequence
  Synthetic oligonucleotide
tcttccatctggtcgcgatacagaatacgattaacataaa

SEQ ID NO: 21 - RNA, 40 nt, Artificial Sequence
  Synthetic oligonucleotide
gaucacgcugcccuuuguuuaaggccuuuauacaaacgca

SEQ ID NO: 22 - DNA, 40 bp, Artificial Sequence
  Synthetic oligonucleotide
gatcacgctgccctttgtttaaggcctttatacaaacgca

SEQ ID NO: 23 - RNA, 40 nt, Artificial Sequence
  Synthetic oligonucleotide
uauucgccagucacaucaacuaugaugacgcuugacugga

SEQ ID NO: 24 - DNA, 40 bp, Artificial Sequence
  Synthetic oligonucleotide
tattcgccagtcacatcaactatgatgacgcttgactgga

SEQ ID NO: 25 - RNA, 40 nt, Artificial Sequence
  Synthetic oligonucleotide
uaccgccucaucaucggacacgacguguaucaguuggcug

SEQ ID NO: 26 - RNA, 40 nt, Artificial Sequence
  Synthetic oligonucleotide
guucucgccucuguccucaugguucgaaccgguaugcaug

SEQ ID NO: 27 - RNA, 40 nt, Artificial Sequence
  Synthetic oligonucleotide
gcgguuucuucuccugacuacaugagauuaauaaacgcgc

SEQ ID NO: 28 - RNA, 40 nt, Artificial Sequence
  Synthetic oligonucleotide
ccgccucgaacacugacgucguggaaccuucgauugcuag

SEQ ID NO: 29 - RNA, 40 nt, Artificial Sequence
  Synthetic oligonucleotide
aaucacaguaauucugccccucugaugaaaccgguuacuu

SEQ ID NO: 30 - RNA, 40 nt, Artificial Sequence
  Synthetic oligonucleotide
cuuagugauuucgccgccccucuguuuaguggccauugga

SEQ ID NO: 31 - RNA, 40 nt, Artificial Sequence
  Synthetic oligonucleotide
acacuauuccgguaagucaucguuuaaccguuuguugcaa

SEQ ID NO: 32 - RNA, 40 nt, Artificial Sequence
  Synthetic oligonucleotide
ugcgcaacgccuugauucacuccuacagugugucuauaga

SEQ ID NO: 33 - RNA, 40 nt, Artificial Sequence
  Synthetic oligonucleotide
aauguuaagcuuacauacgccugggucacucuuuguucug

SEQ ID NO: 34 - RNA, 40 nt, Artificial Sequence
  Synthetic oligonucleotide
guaaauauucacguugaaucgccuugcuccucuuagucug

SEQ ID NO: 35 - RNA, 40 nt, Artificial Sequence
  Synthetic oligonucleotide
ccgccucggaucguucccaauggugguaccccuauuaaug

SEQ ID NO: 36 - RNA, 40 nt, Artificial Sequence
  Synthetic oligonucleotide
uguagaucguucuuauccgccucggucuuccccagguuaa

SEQ ID NO: 37 - RNA, 40 nt, Artificial Sequence
  Synthetic oligonucleotide
aucgucgggccccuuuuaugaaacuuacaugaaagcgcac

SEQ ID NO: 38 - RNA, 40 nt, Artificial Sequence
  Synthetic oligonucleotide
uaagagugcacaguacugccucgauccuccauggcuuaag

SEQ ID NO: 39 - RNA, 40 nt, Artificial Sequence
  Synthetic oligonucleotide
gaauuaguacugacggccgccuugauccuccguuagucug

SEQ ID NO: 40 - RNA, 40 nt, Artificial Sequence
  Synthetic oligonucleotide
gcccgccuccgaagcccuccuaagugcacuuuaaaccgcg

SEQ ID NO: 41 - RNA, 40 nt, Artificial Sequence
  Synthetic oligonucleotide
ccgccugggaucacucucuacgcguauaaaugcucuguca

SEQ ID NO: 42 - RNA, 40 nt, Artificial Sequence
  Synthetic oligonucleotide
agucugacccuguuauggacuaccauaucagaaagguacu

SEQ ID NO: 43 - RNA, 40 nt, Artificial Sequence
  Synthetic oligonucleotide
ggugauccucccccccgccucgaagauuugugcacauauc

SEQ ID NO: 44 - RNA, 40 nt, Artificial Sequence
  Synthetic oligonucleotide
gcuaccaucgucuagugagucacccuuaguucaucaaggc

SEQ ID NO: 45 - DNA, 18 bp, Artificial Sequence
  Synthetic oligonucleotide
gctgtgtgactcctgcaa

SEQ ID NO: 46 - DNA, 19 bp, Artificial Sequence
  Synthetic oligonucleotide
gcagctgtatcttgtctcc

SEQ ID NO: 47 - DNA, 43 bp, Artificial Sequence
  Synthetic oligonucleotide
gtccgcttgggggtgggtatcgaaaattcgcgttctggggcgg

SEQ ID NO: 48 - DNA, 43 bp, Artificial Sequence
  Synthetic oligonucleotide
cttcgctcgtttcaatgttcagttctggtctttaggtctttag

SEQ ID NO: 49 - DNA, 43 bp, Artificial Sequence
  Synthetic oligonucleotide
taggaggataatatgtatccggtgcatcggcctgactttcccc

SEQ ID NO: 50 - DNA, 43 bp, Artificial Sequence
  Synthetic oligonucleotide
taggagggctgaaaacttgcttcttcccggtgcagttataaca

SEQ ID NO: 51 - DNA, 43 bp, Artificial Sequence
  Synthetic oligonucleotide
taggaggataatatgtatccgatgcatgggcccgactttcccc

SEQ ID NO: 52 - DNA, 43 bp, Artificial Sequence
  Synthetic oligonucleotide
tgcgttttccttggggttcagggtaggatgggggtggaggtgg

SEQ ID NO: 53 - DNA, 43 bp, Artificial Sequence
  Synthetic oligonucleotide
ggggggcgggtgggctggtaaaaggtgatgcgggggtattgtt

SEQ ID NO: 54 - DNA, 43 bp, Artificial Sequence
  Synthetic oligonucleotide
taggaggataatatgtatccggtgcatcggcccaactttcccc

SEQ ID NO: 55 - DNA, 43 bp, Artificial Sequence
  Synthetic oligonucleotide
ccaatctcggaaggtttaaataaggtggtctttaggtctttag

SEQ ID NO: 56 - DNA, 43 bp, Artificial Sequence
  Synthetic oligonucleotide
tacgttaagtgggtcgggaggggggaatagggggtttggttgg

SEQ ID NO: 57 - DNA, 43 bp, Artificial Sequence
  Synthetic oligonucleotide
gtgaggtcggtggggcgggggatggtggggggtcgtttacatt

SEQ ID NO: 58 - DNA, 42 bp, Artificial Sequence
  Synthetic oligonucleotide
cgatattgggggggggttggcgggctattttccgggtgggtg

SEQ ID NO: 59 - DNA, 43 bp, Artificial Sequence
  Synthetic oligonucleotide
tcggttcctgttaattcgctggtggttggtggggtggcggatg

SEQ ID NO: 60 - DNA, 42 bp, Artificial Sequence
  Synthetic oligonucleotide
gcggggaggtgggggtgggtggagggttggttactctctact

SEQ ID NO: 61 - DNA, 43 bp, Artificial Sequence
  Synthetic oligonucleotide
cgggaatgggagggtgggggtggtggccgggtcgtgttatacc

SEQ ID NO: 62 - DNA, 43 bp, Artificial Sequence
  Synthetic oligonucleotide
taggaggataatatgtatccggtgcatcggtccgactttcccc

SEQ ID NO: 63 - DNA, 43 bp, Artificial Sequence
  Synthetic oligonucleotide
tatagttgggcgtaggcgggggggggtggttgggaggtccaag

SEQ ID NO: 64 - DNA, 43 bp, Artificial Sequence
  Synthetic oligonucleotide
taggaggataatatgtatccggtgcatcggcccgaccttcccc

SEQ ID NO: 65 - DNA, 43 bp, Artificial Sequence
  Synthetic oligonucleotide
tcgatcgtcctcaggatctcgtggttcaaatcataaagattat

SEQ ID NO: 66 - DNA, 43 bp, Artificial Sequence
  Synthetic oligonucleotide
tgctgtctgggcgggggcggtcttgtggtttctttgggggggg

SEQ ID NO: 67 - DNA, 43 bp, Artificial Sequence
  Synthetic oligonucleotide
gcgagacaggagggtggtcttatacgtgggggggggtggttgg

SEQ ID NO: 68 - DNA, 43 bp, Artificial Sequence
  Synthetic oligonucleotide
taggagggctgaagacttgcttcttcccggtgcagttataaca

SEQ ID NO: 69 - DNA, 43 bp, Artificial Sequence
  Synthetic oligonucleotide
cgtgtggggggtgggttgggctcgggttgttatcagttccatg

SEQ ID NO: 70 - DNA, 43 bp, Artificial Sequence
  Synthetic oligonucleotide
cgatattggggggggggttggcgggctattttccgggtgggtg

SEQ ID NO: 71 - DNA, 43 bp, Artificial Sequence
  Synthetic oligonucleotide
taggaggataatatgtatccggtgcatcggcccgactttcctc

SEQ ID NO: 72 - DNA, 43 bp, Artificial Sequence
  Synthetic oligonucleotide
taggaggataatatgtatccggtgcatcggctcgactttcccc

SEQ ID NO: 73 - DNA, 43 bp, Artificial Sequence
  Synthetic oligonucleotide
cttcgctcgtttcaatgtttagttctggtctttaggtctttag

SEQ ID NO: 74 - DNA, 43 bp, Artificial Sequence
  Synthetic oligonucleotide
ggacatgggttgggtcgggagggggtggtcggttgggcagtaa

SEQ ID NO: 75 - DNA, 43 bp, Artificial Sequence
  Synthetic oligonucleotide
taggaggataatatgtatacgatgcatcggcccgactttcccc

SEQ ID NO: 76 - DNA, 43 bp, Artificial Sequence
  Synthetic oligonucleotide
taggaggataatatgtatcagatgcatcggcccgactttcccc

SEQ ID NO: 77 - DNA, 43 bp, Artificial Sequence
  Synthetic oligonucleotide
tggatgtatggggtctcggggtgggagggttcaacttatctgg

SEQ ID NO: 78 - DNA, 43 bp, Artificial Sequence; identical to SEQ ID NO: 47
  Synthetic oligonucleotide

SEQ ID NO: 79 - DNA, 43 bp, Artificial Sequence
  Synthetic oligonucleotide
tcttgtacaaataggagggaagggggttttgggaggtgggtgg

SEQ ID NO: 80 - DNA, 43 bp, Artificial Sequence; identical to SEQ ID NO: 48
  Synthetic oligonucleotide

SEQ ID NO: 81 - DNA, 43 bp, Artificial Sequence
  Synthetic oligonucleotide
ctgatgttagtaggtcggggtccggttgggggttgggttgagg

SEQ ID NO: 82 - DNA, 43 bp, Artificial Sequence
  Synthetic oligonucleotide
tggctcgtggacgtggtggtggcgggtcgtgggggtgggtagg

SEQ ID NO: 83 - DNA, 43 bp, Artificial Sequence
  Synthetic oligonucleotide
taggaggataatatgtatccgatgcatcggcacgactttcccc

SEQ ID NO: 84 - DNA, 43 bp, Artificial Sequence
  Synthetic oligonucleotide
cggggagggggggtcggggtatttattgtgtatgttttttgtg

SEQ ID NO: 85 - DNA, 43 bp, Artificial Sequence
  Synthetic oligonucleotide
tgactgtatcttggggcgggttctggggggggtgtattgttca

SEQ ID NO: 86 - DNA, 43 bp, Artificial Sequence
  Synthetic oligonucleotide
taggaggataatatgtatccgatgcatcggcccgactttcacc

SEQ ID NO: 87 - DNA, 43 bp, Artificial Sequence
  Synthetic oligonucleotide
tcatgtctaggggggggaagtcggtttgggtgggtactctgtg

SEQ ID NO: 88 - DNA, 43 bp, Artificial Sequence
  Synthetic oligonucleotide
cttgtttcgctttgggtttgggcgggtgggtcaattcctgttg

SEQ ID NO: 89 - DNA, 43 bp, Artificial Sequence
  Synthetic oligonucleotide
ggtgggggccctcggtactgtggcggggtgggtgggtttagtg

SEQ ID NO: 90 - DNA, 43 bp, Artificial Sequence; identical to SEQ ID NO: 52
  Synthetic oligonucleotide

SEQ ID NO: 91 - DNA, 43 bp, Artificial Sequence
  Synthetic oligonucleotide
tggtggggtgggtctgtggggtggttttgttcttatcggggtt

SEQ ID NO: 92 - DNA, 43 bp, Artificial Sequence
  Synthetic oligonucleotide
tgggtgggttacgggtgggtgttgttatcgcgctgatctggtt

SEQ ID NO: 93 - DNA, 43 bp, Artificial Sequence
  Synthetic oligonucleotide
cgtgacggttttaatcaggggggggactctaacatttgggtgg

SEQ ID NO: 94 - DNA, 43 bp, Artificial Sequence
  Synthetic oligonucleotide
tgctcatatcgtggggggatggggttgctagtggatggggtgg

SEQ ID NO: 95 - DNA, 43 bp, Artificial Sequence; identical to SEQ ID NO: 53
  Synthetic oligonucleotide

SEQ ID NO: 96 - DNA, 43 bp, Artificial Sequence
  Synthetic oligonucleotide
tgatgtggggggtggggtataatacttatgtttggggtttggg

SEQ ID NO: 97 - DNA, 43 bp, Artificial Sequence
  Synthetic oligonucleotide
ttgggtgggtgggaatgggtattttttcttcgggcgatgtttg

SEQ ID NO: 98 - DNA, 43 bp, Artificial Sequence
  Synthetic oligonucleotide
tagttggatactggatttgggagggatggggggaggagggtgg

SEQ ID NO: 99 - DNA, 42 bp, Artificial Sequence
  Synthetic oligonucleotide
ctggaaggttgggtgtggggcgggggggaggtctctctatgt

SEQ ID NO: 100 - DNA, 43 bp, Artificial Sequence; identical to SEQ ID NO: 56
  Synthetic oligonucleotide

SEQ ID NO: 101 - DNA, 43 bp, Artificial Sequence
  Synthetic oligonucleotide
tgccgtgggccggggagggtgggttggcgtctctgtttcgata

SEQ ID NO: 102 - DNA, 43 bp, Artificial Sequence
  Synthetic oligonucleotide
gggggggcggccggggtggactgtggcccgtcttcgtattgtt

SEQ ID NO: 103 - DNA, 42 bp, Artificial Sequence
  Synthetic oligonucleotide
tggtggtggctgggggacgggtatcctggaattaggggtggg

SEQ ID NO: 104 - DNA, 43 bp, Artificial Sequence
  Synthetic oligonucleotide
tcggttcatgttgggtgggatcggggcggggtttcttctcctg

SEQ ID NO: 105 - DNA, 43 bp, Artificial Sequence; identical to SEQ ID NO: 75
  Synthetic oligonucleotide

SEQ ID NO: 106 - DNA, 43 bp, Artificial Sequence
  Synthetic oligonucleotide
tcgtgggtgtgttctggggggcgtggacgggggttaatgggca

SEQ ID NO: 107 - DNA, 43 bp, Artificial Sequence
  Synthetic oligonucleotide
taggaggataatatgtatccgatgcatcggcccgactttcccc

SEQ ID NO: 108 - DNA, 43 bp, Artificial Sequence
  Synthetic oligonucleotide
taagagtcttaggatgacgtcattcgtccgtcacggtgcggga

SEQ ID NO: 109 - DNA, 43 bp, Artificial Sequence
  Synthetic oligonucleotide
gcctggccagatagcagttaccttacgggatctatattcaccg

SEQ ID NO: 110 - DNA, 43 bp, Artificial Sequence; identical to SEQ ID NO: 82
  Synthetic oligonucleotide

SEQ ID NO: 111 - DNA, 43 bp, Artificial Sequence
  Synthetic oligonucleotide
ttcgtgttcatctgtttattgttattcacaatccgtcttttgt

SEQ ID NO: 112 - DNA, 43 bp, Artificial Sequence
  Synthetic oligonucleotide
cgaatccgtcgaccgccctcgtaaccatccaacccagtctcct

SEQ ID NO: 113 - DNA, 43 bp, Artificial Sequence
  Synthetic oligonucleotide
caggaaagttacttatcttttagacggttatgttctcattact

SEQ ID NO: 114 - DNA, 43 bp, Artificial Sequence
  Synthetic oligonucleotide
atctgctcgatacgtagatagtctgctcgatacaaaagggtgg

SEQ ID NO: 115 - DNA, 43 bp, Artificial Sequence
  Synthetic oligonucleotide
cgatgagcgggctccgatattgtgtcggcgtgactaccttgat

SEQ ID NO: 116 - DNA, 43 bp, Artificial Sequence
  Synthetic oligonucleotide
ggtcggcctatttattgcggcacgttgtttcttgatgtcgccc

SEQ ID NO: 117 - DNA, 43 bp, Artificial Sequence
  Synthetic oligonucleotide
tcgaattcagttctacatgtgtatttcttgctccgtttcagaa

SEQ ID NO: 118 - DNA, 43 bp, Artificial Sequence
  Synthetic oligonucleotide
tcggtccggcaacaaaccccacgcgccttcgatatgcctgtcg

SEQ ID NO: 119 - DNA, 43 bp, Artificial Sequence; identical to SEQ ID NO: 55
  Synthetic oligonucleotide

SEQ ID NO: 120 - DNA, 43 bp, Artificial Sequence; identical to SEQ ID NO: 70
  Synthetic oligonucleotide

SEQ ID NO: 121 - DNA, 43 bp, Artificial Sequence; identical to SEQ ID NO: 61
  Synthetic oligonucleotide

SEQ ID NO: 122 - DNA, 43 bp, Artificial Sequence
  Synthetic oligonucleotide
cgtggtgggttcttgggtggggggggagggttggcgtagtata

SEQ ID NO: 123 - DNA, 43 bp, Artificial Sequence; identical to SEQ ID NO: 57
  Synthetic oligonucleotide

SEQ ID NO: 124 - DNA, 43 bp, Artificial Sequence; identical to SEQ ID NO: 56
  Synthetic oligonucleotide

SEQ ID NO: 125 - DNA, 43 bp, Artificial Sequence; identical to SEQ ID NO: 54
  Synthetic oligonucleotide

SEQ ID NO: 126 - DNA, 43 bp, Artificial Sequence; identical to SEQ ID NO: 50
  Synthetic oligonucleotide

SEQ ID NO: 127 - DNA, 43 bp, Artificial Sequence; identical to SEQ ID NO: 59
  Synthetic oligonucleotide

SEQ ID NO: 128 - DNA, 43 bp, Artificial Sequence; identical to SEQ ID NO: 66
  Synthetic oligonucleotide

SEQ ID NO: 129 - DNA, 43 bp, Artificial Sequence
  Synthetic oligonucleotide
aacatggggttctgataaacctgtgccaaatacattgttgagt

SEQ ID NO: 130 - DNA, 43 bp, Artificial Sequence
  Synthetic oligonucleotide
attcctcctttgtaagggatgatatccaactcctctgcgttcg

SEQ ID NO: 131 - DNA, 20 bp, Artificial Sequence
  Synthetic oligonucleotide
ctagcatgactgcagtacgt

SEQ ID NO: 132 - DNA, 33 bp, Artificial Sequence
  Synthetic oligonucleotide
ctgtctcttatacacatctgacgctgccgacga

SEQ ID NO: 133 - DNA, 15 bp, Artificial Sequence
  Synthetic oligonucleotide
tcgtcggcagcgtca

SEQ ID NO: 134 - protein, 8 aa, Artificial Sequence
  Synthetic peptide
DYKDDDDK

SEQ ID NO: 135 - protein, 9 aa, Artificial Sequence
  Synthetic peptide
YPYDVPDYA

SEQ ID NO: 136 - protein, 10 aa, Artificial Sequence
  Synthetic peptide
EQKLISEEDL

SEQ ID NO: 137 - DNA, 35 bp, Artificial Sequence
  Synthetic oligonucleotide
aacccgcgtgattggggtactgcccatgcgacttt

SEQ ID NO: 138 - DNA, 35 bp, Artificial Sequence
  Synthetic oligonucleotide
aactgaaggccaattaaactccactgtgctaatct

SEQ ID NO: 139 - DNA, 38 bp, Artificial Sequence
  Synthetic oligonucleotide
acatgccggcgttgatactctactgtgctccattatga

SEQ ID NO: 140 - DNA, 36 bp, Artificial Sequence
  Synthetic oligonucleotide
agacatgccacgccctttacatactccactgtgcca

SEQ ID NO: 141 - DNA, 34 bp, Artificial Sequence
  Synthetic oligonucleotide
agccacgcagacctatctctactgtgccaatgtt

SEQ ID NO: 142 - DNA, 37 bp, Artificial Sequence
  Synthetic oligonucleotide
aggtacgtaaggctgccattactctctactgtgccga

SEQ ID NO: 143 - DNA, 35 bp, Artificial Sequence
  Synthetic oligonucleotide
agtctagcgatcgacttttctctacggtgcccttc

SEQ ID NO: 144 - DNA, 37 bp, Artificial Sequence
  Synthetic oligonucleotide
agtgtgcgcatgaatccattactccactgtgccttga

SEQ ID NO: 145 - DNA, 37 bp, Artificial Sequence
  Synthetic oligonucleotide
agttgcagacccttgtattctctaccgtgccctatga

SEQ ID NO: 146 - DNA, 34 bp, Artificial Sequence
  Synthetic oligonucleotide
cactgctaactgatattgttgaactccaccgtgc

SEQ ID NO: 147 - DNA, 38 bp, Artificial Sequence
  Synthetic oligonucleotide
catgcgacaagcttccattaaccatccgctatttatga

SEQ ID NO: 148 - DNA, 36 bp, Artificial Sequence
  Synthetic oligonucleotide
catgcggaccacgctttcacaaactcatgattcaaa

SEQ ID NO: 149 - DNA, 35 bp, Artificial Sequence
  Synthetic oligonucleotide
catgcgtacgtcctattctctctactgtgcattaa

SEQ ID NO: 150 - DNA, 35 bp, Artificial Sequence
  Synthetic oligonucleotide
cctgcaatgcggaaacccttctactctactgtgcc

SEQ ID NO: 151 - DNA, 36 bp, Artificial Sequence
  Synthetic oligonucleotide
cgcgagccagggtactgcctgcggtctaaacaatca

SEQ ID NO: 152 - DNA, 36 bp, Artificial Sequence
  Synthetic oligonucleotide
cgtgcgacttgttctctactgtgccaataaaccata

SEQ ID NO: 153 - DNA, 35 bp, Artificial Sequence
  Synthetic oligonucleotide
gatagcgcatattcctctactgtgctacttgttat

SEQ ID NO: 154 - DNA, 36 bp, Artificial Sequence
  Synthetic oligonucleotide
gcaaaccaattagtgtacctctaccgtgcccaatga

SEQ ID NO: 155 - DNA, 38 bp, Artificial Sequence
  Synthetic oligonucleotide
gcaactactctctaccgtgcccagtgatttctccatga

SEQ ID NO: 156 - DNA, 36 bp, Artificial Sequence
  Synthetic oligonucleotide
gcaccacatgtcaatctctactgtgcttatctcata

SEQ ID NO: 157 - DNA, 36 bp, Artificial Sequence
  Synthetic oligonucleotide
gcagcacaaaagttactctcctctaccgtgccccta

SEQ ID NO: 158 - DNA, 36 bp, Artificial Sequence
  Synthetic oligonucleotide
gcagtttgcgtggatactctactgtgctgaccctta

SEQ ID NO: 159 - DNA, 36 bp, Artificial Sequence
  Synthetic oligonucleotide
gcatacatgaactctaccgtgcccgttgacttgaaa

SEQ ID NO: 160 - DNA, 35 bp, Artificial Sequence
  Synthetic oligonucleotide
gcatagcggttcacattattttactctaccgtgcc

SEQ ID NO: 161 - DNA, 34 bp, Artificial Sequence
  Synthetic oligonucleotide
gccacagtatcgttctcgagctggttcccgccat

SEQ ID NO: 162 - DNA, 38 bp, Artificial Sequence
  Synthetic oligonucleotide
gcgaacatcactctaccgtgccatctgaaatgacgtga

SEQ ID NO: 163 - DNA, 38 bp, Artificial Sequence
  Synthetic oligonucleotide
gcgaacttgtaactctactgtgcttatattaaggttga

SEQ ID NO: 164 - DNA, 35 bp, Artificial Sequence
  Synthetic oligonucleotide
gcgaccaatactctactgtgctgatacggatttta

SEQ ID NO: 165 - DNA, 35 bp, Artificial Sequence
  Synthetic oligonucleotide
gcgaccactctataacctcaaccgtgctcactcct

SEQ ID NO: 166 - DNA, 37 bp, Artificial Sequence
  Synthetic oligonucleotide
gcgcaagttgtctctaccgtgccccgaaagttttgga

SEQ ID NO: 167 - DNA, 35 bp, Artificial Sequence
  Synthetic oligonucleotide
gcgcaccacctacattgtctccaccgtgctttatt

SEQ ID NO: 168 - DNA, 36 bp, Artificial Sequence
  Synthetic oligonucleotide
gcgcacccacgtgaactctaccgtgcctatttccta

SEQ ID NO: 169 - DNA, 38 bp, Artificial Sequence
  Synthetic oligonucleotide
gcgcaccgacctctaccgtgccaaaataggttatctga

SEQ ID NO: 170 - DNA, 35 bp, Artificial Sequence
  Synthetic oligonucleotide
gcgccaccacacaaaccttccctatcgagggagat

SEQ ID NO: 171 - DNA, 37 bp, Artificial Sequence
  Synthetic oligonucleotide
gcgcggactatattactctactgtgccctgcttatga

SEQ ID NO: 172 - DNA, 35 bp, Artificial Sequence
  Synthetic oligonucleotide
gcggataggacaataacttactccactgtgccatc

SEQ ID NO: 173 - DNA, 35 bp, Artificial Sequence
  Synthetic oligonucleotide
gcggtgacctctactgtgcgccccaagccttagtt

SEQ ID NO: 174 - DNA, 38 bp, Artificial Sequence
  Synthetic oligonucleotide
gcgtacagaacctctaccgtgcccactcacttccatga

SEQ ID NO: 175 - DNA, 35 bp, Artificial Sequence
  Synthetic oligonucleotide
gcgtcccctcccggatggtcctttctctactgtgc

SEQ ID NO: 176 - DNA, 35 bp, Artificial Sequence
  Synthetic oligonucleotide
gcgtgctaacggtatgcaagacgtatgcgattttc

SEQ ID NO: 177 - DNA, 35 bp, Artificial Sequence
  Synthetic oligonucleotide
gctagaccgatccacctcaaacctctactgtgcct

SEQ ID NO: 178 - DNA, 35 bp, Artificial Sequence
  Synthetic oligonucleotide
gctagcttagctctaccgtgcacattccgctattt

SEQ ID NO: 179 - DNA, 35 bp, Artificial Sequence
  Synthetic oligonucleotide
ggtgcaggcaagatattttactctactgtgcattt

SEQ ID NO: 180 - DNA, 35 bp, Artificial Sequence
  Synthetic oligonucleotide
gtaaatgtacatgcgtatcctcacctctactgtgc

SEQ ID NO: 181 - DNA, 35 bp, Artificial Sequence
  Synthetic oligonucleotide
taacacgtctttcactctactgtgccctttatgcc

SEQ ID NO: 182 - DNA, 38 bp, Artificial Sequence
  Synthetic oligonucleotide
taatggcatgcggacctatcctctaccgtgctccttga

SEQ ID NO: 183 - DNA, 35 bp, Artificial Sequence
  Synthetic oligonucleotide
tatgcgatttctctaccgtgccaatatgccttgtt

SEQ ID NO: 184 - DNA, 36 bp, Artificial Sequence
  Synthetic oligonucleotide
tctgcgattctaccgttactctaccgtgccaccaaa

SEQ ID NO: 185 - DNA, 36 bp, Artificial Sequence
  Synthetic oligonucleotide
tgcgcagtcatttcgccatgttctctaccgtgccaa

SEQ ID NO: 186 - DNA, 38 bp, Artificial Sequence
  Synthetic oligonucleotide
tgtcaggcggtagtactctccaccgtgcctattgttga

SEQ ID NO: 187 - DNA, 35 bp, Artificial Sequence
  Synthetic oligonucleotide
acatgcataccctacgaatcgttccatcaccatac

SEQ ID NO: 188 - DNA, 35 bp, Artificial Sequence
  Synthetic oligonucleotide
agtcagtgcgcccgctatttacgatctcactgttc

SEQ ID NO: 189 - DNA, 35 bp, Artificial Sequence
  Synthetic oligonucleotide
agtgcagtcgcgatgggaacttcttctttgcttta

SEQ ID NO: 190 - DNA, 36 bp, Artificial Sequence
  Synthetic oligonucleotide
atggccatgcgaaccgaaacctagcccattttccta

SEQ ID NO: 191 - DNA, 34 bp, Artificial Sequence
  Synthetic oligonucleotide
attgcggtcatccccttccacgctataccaccat

SEQ ID NO: 192 - DNA, 35 bp, Artificial Sequence
  Synthetic oligonucleotide
cactgcaggtcactggcgccctatttcctcacatt

SEQ ID NO: 193 - DNA, 35 bp, Artificial Sequence
  Synthetic oligonucleotide
catgcccgtaaacgcctaatctaccaccttttgct

SEQ ID NO: 194 - DNA, 35 bp, Artificial Sequence
  Synthetic oligonucleotide
catgccgcctttcgacttccatatcccaacacgcc

SEQ ID NO: 195 - DNA, 35 bp, Artificial Sequence
  Synthetic oligonucleotide
catgccggtcattccatactcaaactcattcactc

SEQ ID NO: 196 - DNA, 35 bp, Artificial Sequence
  Synthetic oligonucleotide
catgcgagctacccttatcatctcatgtttgcttt

SEQ ID NO: 197 - DNA, 35 bp, Artificial Sequence
  Synthetic oligonucleotide
catgcgattgcgccccattccttgccttatctcac

SEQ ID NO: 198 - DNA, 36 bp, Artificial Sequence
  Synthetic oligonucleotide
catgcgcacatcgtactccgtagccctaaattatca

SEQ ID NO: 199 - DNA, 35 bp, Artificial Sequence
  Synthetic oligonucleotide
catgcgccctgtgcgttctctactaccctaatcat

SEQ ID NO: 200 - DNA, 38 bp, Artificial Sequence
  Synthetic oligonucleotide
catgtacgcacacccactgattctttaccacccactga

SEQ ID NO: 201 - DNA, 35 bp, Artificial Sequence
  Synthetic oligonucleotide
gcaggacaccccctcattatttgtttcatcctacg

SEQ ID NO: 202 - DNA, 35 bp, Artificial Sequence
  Synthetic oligonucleotide
gcatcaggcgcactttcatttgctaatcgtttttt

SEQ ID NO: 203 - DNA, 35 bp, Artificial Sequence
  Synthetic oligonucleotide
gccatgcgagagggttattgttgatctcatgggtt

SEQ ID NO: 204 - DNA, 35 bp, Artificial Sequence
  Synthetic oligonucleotide
gcgataaagcccatgtaaccctctgaaaacccgat

SEQ ID NO: 205 - DNA, 35 bp, Artificial Sequence
  Synthetic oligonucleotide
gcgccacgagctacccgacttccgattactttctt

SEQ ID NO: 206 - DNA, 35 bp, Artificial Sequence
  Synthetic oligonucleotide
gcggacatcgggcactttatacaaccacctttttg

SEQ ID NO: 207 - DNA, 36 bp, Artificial Sequence
  Synthetic oligonucleotide
gctgcaggccgtcccaaatattcgctcccacacata

SEQ ID NO: 208 - DNA, 35 bp, Artificial Sequence
  Synthetic oligonucleotide
gctggtcaggcgttccacacttcctacccgctttt

SEQ ID NO: 209 - DNA, 35 bp, Artificial Sequence
  Synthetic oligonucleotide
tatgcgcaggaccacctattacacgaccttatcct

SEQ ID NO: 210 - DNA, 35 bp, Artificial Sequence
  Synthetic oligonucleotide
tcaactggggtcagtgccaacgcttactttcttct

SEQ ID NO: 211 - DNA, 35 bp, Artificial Sequence
  Synthetic oligonucleotide
tcaagcagtcatagccggtttcacgctttacttac

SEQ ID NO: 212 - DNA, 35 bp, Artificial Sequence
  Synthetic oligonucleotide
aaaacacgcaaactacctggaaacttgacttcttt

SEQ ID NO: 213 - DNA, 35 bp, Artificial Sequence
  Synthetic oligonucleotide
aaaacactcacgatacctaccctggtcttcacaac

SEQ ID NO: 214 - DNA, 35 bp, Artificial Sequence
  Synthetic oligonucleotide
aaaacagcaggcattttcctgtactttcgaattca

SEQ ID NO: 215 - DNA, 35 bp, Artificial Sequence
  Synthetic oligonucleotide
aaaaccacagctaccattatcgcattggccctact

SEQ ID NO: 216 - DNA, 35 bp, Artificial Sequence
  Synthetic oligonucleotide
aaaacccaagcaccgaacgaactatccctttttct

SEQ ID NO: 217 - DNA, 35 bp, Artificial Sequence
  Synthetic oligonucleotide
aaaacccaccacgcgtcgtacgcataccacccttt

SEQ ID NO: 218 - DNA, 35 bp, Artificial Sequence
  Synthetic oligonucleotide
aaaaccggtcctgcgccttcttctccgcttttatt

SEQ ID NO: 219 - DNA, 35 bp, Artificial Sequence
  Synthetic oligonucleotide
caggtactgtggcaggcgatccattgctctctttt

SEQ ID NO: 220 - DNA, 35 bp, Artificial Sequence
  Synthetic oligonucleotide
caggtcagcagtccaggcgattactttctcttttc

SEQ ID NO: 221 - DNA, 35 bp, Artificial Sequence
  Synthetic oligonucleotide
cagtaaccgctgtctgtcatttttcaacattctgt

SEQ ID NO: 222 - DNA, 36 bp, Artificial Sequence
  Synthetic oligonucleotide
cagtaactgtagtcgtcgaaccttgcttacaaccca

SEQ ID NO: 223 - DNA, 35 bp, Artificial Sequence
  Synthetic oligonucleotide
cagtaaggaagctcatgcggtacaggtctacctcg

SEQ ID NO: 224 - DNA, 38 bp, Artificial Sequence
  Synthetic oligonucleotide
cagtaagtgctgtcactgcgccacttgtaaatacttga

SEQ ID NO: 225 - DNA, 36 bp, Artificial Sequence
  Synthetic oligonucleotide
cagtaatgcgaagctagtacgttctctcttatttta

SEQ ID NO: 226 - DNA, 35 bp, Artificial Sequence
  Synthetic oligonucleotide
cagtacaaacatcgcgattctttccttgatactgt

SEQ ID NO: 227 - DNA, 35 bp, Artificial Sequence
  Synthetic oligonucleotide
gagggcggctctaatgcatgcgctttcatctttgc

SEQ ID NO: 228 - DNA, 36 bp, Artificial Sequence
  Synthetic oligonucleotide
gagggcgggcagtcatttcgattatatctgcctaca

SEQ ID NO: 229 - DNA, 37 bp, Artificial Sequence
  Synthetic oligonucleotide
gagggcggtccaacgcgcaatgtcttttttcttccga

SEQ ID NO: 230 - DNA, 35 bp, Artificial Sequence
  Synthetic oligonucleotide
gagggcgtacaggagtcttgcggtccacattttat

SEQ ID NO: 231 - DNA, 35 bp, Artificial Sequence
  Synthetic oligonucleotide
gagggctactgaagttaatggcattcttctctatc

SEQ ID NO: 232 - DNA, 35 bp, Artificial Sequence
  Synthetic oligonucleotide
gagggctcatgccagccgcttttcttacctttatc

SEQ ID NO: 233 - DNA, 38 bp, Artificial Sequence
  Synthetic oligonucleotide
gagggctgaacaagtagtgcgtacattttccttcctga

SEQ ID NO: 234 - DNA, 35 bp, Artificial Sequence
  Synthetic oligonucleotide
gagggctgcaggcatccaatttcctccttgtccct

SEQ ID NO: 235 - DNA, 35 bp, Artificial Sequence
  Synthetic oligonucleotide
gaggggccgtccttcgtacggaatgtgcatgcgct

SEQ ID NO: 236 - DNA, 35 bp, Artificial Sequence
  Synthetic oligonucleotide
gaggggcggtcattgccgttagcctcctttcgcct

SEQ ID NO: 237 - DNA, 37 bp, Artificial Sequence
  Synthetic oligonucleotide
gcgaaactcgccatatacttaaacttgcccttttgga

SEQ ID NO: 238 - DNA, 38 bp, Artificial Sequence
  Synthetic oligonucleotide
aactgcacgtaaccttaatcactccaccgtgccattga

SEQ ID NO: 239 - DNA, 36 bp, Artificial Sequence
  Synthetic oligonucleotide
ttcgccgttaagcatcgtgtcatgcgcaactgttaa

SEQ ID NO: 240 - DNA, 35 bp, Artificial Sequence
  Synthetic oligonucleotide
acgcggacctagcatatcgtagtgcgtggcacttt

SEQ ID NO: 241 - DNA, 35 bp, Artificial Sequence
  Synthetic oligonucleotide
tatgcgcgccatcaccggaactaggtttgggcttt

SEQ ID NO: 242 - DNA, 35 bp, Artificial Sequence
  Synthetic oligonucleotide
gagtacggaatcgtgtcatcagctggatacttttt

SEQ ID NO: 243 - DNA, 38 bp, Artificial Sequence
  Synthetic oligonucleotide
atgcactgggctgaccggtattgcgtatttctctttga

SEQ ID NO: 244 - DNA, 35 bp, Artificial Sequence
  Synthetic oligonucleotide
tatgccccgttccattcttcattcactactagccc

SEQ ID NO: 245 - DNA, 36 bp, Artificial Sequence
  Synthetic oligonucleotide
aagcacaggtactagcaggttcgcactccctgacta

SEQ ID NO: 246 - DNA, 35 bp, Artificial Sequence
  Synthetic oligonucleotide
cacgccccaatatgccatactctactgtgcccctt

SEQ ID NO: 247 - DNA, 35 bp, Artificial Sequence
  Synthetic oligonucleotide
aatgcgcgctaaagaaggacttgtcttgccagccc

SEQ ID NO: 248 - DNA, 35 bp, Artificial Sequence
  Synthetic oligonucleotide
gaacggatcgtagtgaaacaggactggagcggccc

SEQ ID NO: 249 - DNA, 35 bp, Artificial Sequence
  Synthetic oligonucleotide
tcgtaggacaaaggcactggttgaatcttttctat

SEQ ID NO: 250 - DNA, 35 bp, Artificial Sequence
  Synthetic oligonucleotide
tgcgcgctaaacactgcaagtctagccccgcattc

SEQ ID NO: 251 - DNA, 35 bp, Artificial Sequence
  Synthetic oligonucleotide
tcacctaccaagtctccaatcattgcaccctctac

SEQ ID NO: 252 - DNA, 36 bp, Artificial Sequence
  Synthetic oligonucleotide
gcctatcaatgtctctctactgtgccggacttttta

SEQ ID NO: 253 - DNA, 36 bp, Artificial Sequence
  Synthetic oligonucleotide
aggactgcccccgcctgactctactgtgccatctca

SEQ ID NO: 254 - DNA, 35 bp, Artificial Sequence
  Synthetic oligonucleotide
ggtagctccaccgtgccatactcgatctttgttac

SEQ ID NO: 255 - DNA, 38 bp, Artificial Sequence
  Synthetic oligonucleotide
ttccgcgacctaactccaccgtgccataatccctttga

SEQ ID NO: 256 - DNA, 36 bp, Artificial Sequence
  Synthetic oligonucleotide
agacttaagcaaggtcgtacgtaggtagtcccacca

SEQ ID NO: 257 - DNA, 36 bp, Artificial Sequence
  Synthetic oligonucleotide
gctaactgcaggccccctatccgacctaaatataca

SEQ ID NO: 258 - DNA, 36 bp, Artificial Sequence
  Synthetic oligonucleotide
atcgtagtacgaatgtcaagcgtacacgctttccta

SEQ ID NO: 259 - DNA, 36 bp, Artificial Sequence
  Synthetic oligonucleotide
gcgttgatctctaccgtgcaccgaacactccccaca

SEQ ID NO: 260 - DNA, 38 bp, Artificial Sequence
  Synthetic oligonucleotide
gccgctatatcaatcctctactgtgcgaattaacctga

SEQ ID NO: 261 - DNA, 35 bp, Artificial Sequence
  Synthetic oligonucleotide
ttgctgttatcgtcctctactgtgccggtattcct

SEQ ID NO: 262 - DNA, 35 bp, Artificial Sequence
  Synthetic oligonucleotide
gtcatgcggaagctttcctgttttggtataatgtc

SEQ ID NO: 263 - DNA, 36 bp, Artificial Sequence
  Synthetic oligonucleotide
gcgaacagatttctctacggtgcttacacatattta

SEQ ID NO: 264 - DNA, 36 bp, Artificial Sequence
  Synthetic oligonucleotide
actggaaggagtcctacctgcctgacgcgtgacgta

SEQ ID NO: 265 - DNA, 38 bp, Artificial Sequence
  Synthetic oligonucleotide
gccaatactccactgtgcttgattttacttttgaatga

SEQ ID NO: 266 - DNA, 35 bp, Artificial Sequence
  Synthetic oligonucleotide
tgacctactaagtcagcgcacatcctgggctttct

SEQ ID NO: 267 - DNA, 35 bp, Artificial Sequence
  Synthetic oligonucleotide
tgtctctactgtgcccaattgttcggaaataactt

SEQ ID NO: 268 - DNA, 35 bp, Artificial Sequence
  Synthetic oligonucleotide
aacctctgctgtgcgttaaactctaccgtgcctac

SEQ ID NO: 269 - DNA, 36 bp, Artificial Sequence
  Synthetic oligonucleotide
tacaacgcgtgcttggggtgacgtggtgcctcttta

SEQ ID NO: 270 - DNA, 36 bp, Artificial Sequence
  Synthetic oligonucleotide
tagtcttgccgtctatctctaccgtgcctggcccta

SEQ ID NO: 271 - DNA, 35 bp, Artificial Sequence
  Synthetic oligonucleotide
gcggaactcgcccccttacatcattttttttggtt

SEQ ID NO: 272 - DNA, 35 bp, Artificial Sequence
  Synthetic oligonucleotide
tgcgtgctaaacggtctagcacatgcgggcctcac

SEQ ID NO: 273 - DNA, 38 bp, Artificial Sequence
  Synthetic oligonucleotide
gctgcagtgcgactctggcctccactgtgctaccttga

SEQ ID NO: 274 - DNA, 35 bp, Artificial Sequence
  Synthetic oligonucleotide
ggccacgactggttccccaattcacaggtatacat

SEQ ID NO: 275 - DNA, 35 bp, Artificial Sequence
  Synthetic oligonucleotide
gcgatagccttaacttgccttctgtgaactcgcct

SEQ ID NO: 276 - DNA, 35 bp, Artificial Sequence
  Synthetic oligonucleotide
tcacctactaggtccatccaatacttattgtccca

SEQ ID NO: 277 - DNA, 35 bp, Artificial Sequence
  Synthetic oligonucleotide
catgcggcaagcttttaactcagctttatctcata

SEQ ID NO: 278 - DNA, 38 bp, Artificial Sequence
  Synthetic oligonucleotide
catgacattttctccactgtgcttgtaattagtattga

SEQ ID NO: 279 - DNA, 36 bp, Artificial Sequence
  Synthetic oligonucleotide
aactccaccgtgcccacttcttgtttcatagtttaa

SEQ ID NO: 280 - DNA, 38 bp, Artificial Sequence
  Synthetic oligonucleotide
ccatgcgattttgtttcccctctactgtgcttatctga

SEQ ID NO: 281 - DNA, 35 bp, Artificial Sequence
  Synthetic oligonucleotide
tgttcacctgtccttcctctctactgtgccgttct

SEQ ID NO: 282 - DNA, 35 bp, Artificial Sequence
  Synthetic oligonucleotide
atgcgcgcgatcgaggtccccgatggcttcgctcc

SEQ ID NO: 283 - DNA, 36 bp, Artificial Sequence
  Synthetic oligonucleotide
tccgcgtgtaaccttggcatgtacctagtgtccaca

SEQ ID NO: 284 - DNA, 36 bp, Artificial Sequence
  Synthetic oligonucleotide
catgccaagctttcatttaggatttcgcccacatca

SEQ ID NO: 285 - DNA, 37 bp, Artificial Sequence
  Synthetic oligonucleotide
gcgtctgcgtcctagttttctctaccgtgcttttcga

SEQ ID NO: 286 - DNA, 36 bp, Artificial Sequence
  Synthetic oligonucleotide
ggctgctagacctccaccgtgccctttctttggtta

SEQ ID NO: 287 - DNA, 35 bp, Artificial Sequence
  Synthetic oligonucleotide
gagtcaggcccaggcttacatatcactagctttta

SEQ ID NO: 288 - DNA, 36 bp, Artificial Sequence
  Synthetic oligonucleotide
aatactctactgtgccccccgttttctcatcgatca

SEQ ID NO: 289 - DNA, 35 bp, Artificial Sequence
  Synthetic oligonucleotide
aggcatgcgcagagttaatttttttctctactgtg

SEQ ID NO: 290 - DNA, 36 bp, Artificial Sequence
  Synthetic oligonucleotide
gacctgcagcgcacgcccgatatctctactgtgcca

SEQ ID NO: 291 - DNA, 36 bp, Artificial Sequence
  Synthetic oligonucleotide
ccggggctaggaaagctaccacgtcatgcggaacta

SEQ ID NO: 292 - DNA, 35 bp, Artificial Sequence
  Synthetic oligonucleotide
catctcaaaactttcctctaccgtgcaaacattta

SEQ ID NO: 293 - DNA, 35 bp, Artificial Sequence
  Synthetic oligonucleotide
gcgatcgaacttgcctcctacaatcatcaactagc

SEQ ID NO: 294 - DNA, 38 bp, Artificial Sequence
  Synthetic oligonucleotide
cagtcatcccgtggactctgtgctcgtatctccattga

SEQ ID NO: 295 - DNA, 36 bp, Artificial Sequence
  Synthetic oligonucleotide
tcgtagtacgcggtgaaccctcaatttacgccccta

SEQ ID NO: 296 - DNA, 37 bp, Artificial Sequence
  Synthetic oligonucleotide
gcgtcgtccaactccactgtgcccattttaggtctga

SEQ ID NO: 297 - DNA, 35 bp, Artificial Sequence
  Synthetic oligonucleotide
gcatatgcggtgtttctactctaccgtgcaaaacc

SEQ ID NO: 298 - DNA, 36 bp, Artificial Sequence
  Synthetic oligonucleotide
gcggcaacacttcctctactgtgcttcctggcttaa

SEQ ID NO: 299 - DNA, 35 bp, Artificial Sequence
  Synthetic oligonucleotide
gattcggtccccttcttctctactgtgccttttct

SEQ ID NO: 300 - DNA, 35 bp, Artificial Sequence
  Synthetic oligonucleotide
ccgcgtgcttggtgcgtgctgcaggaaattggaaa

SEQ ID NO: 301 - DNA, 36 bp, Artificial Sequence
  Synthetic oligonucleotide
gcgtgccaacggactggagctctattgattgttcta

SEQ ID NO: 302 - DNA, 35 bp, Artificial Sequence
  Synthetic oligonucleotide
atgtacgtgcgtaccttttatattctctactgtgc

SEQ ID NO: 303 - DNA, 36 bp, Artificial Sequence
  Synthetic oligonucleotide
agagcctgggcttgctagctggatttggtcacgaaa

SEQ ID NO: 304 - DNA, 35 bp, Artificial Sequence
  Synthetic oligonucleotide
tactgcgcgcctggacccgtgtgctagacatgcgc

SEQ ID NO: 305 - DNA, 36 bp, Artificial Sequence
  Synthetic oligonucleotide
ccgtggtgccctgcgcgctaagaggctcacggagta

SEQ ID NO: 306 - DNA, 35 bp, Artificial Sequence
  Synthetic oligonucleotide
gtaccggacctagggactaacgtactggcacctct

SEQ ID NO: 307 - DNA, 36 bp, Artificial Sequence
  Synthetic oligonucleotide
taccgcgagcttgggaagtgctgctacgtctgccga

SEQ ID NO: 308 - DNA, 35 bp, Artificial Sequence
  Synthetic oligonucleotide
ggtatgcccgcttttactctactgtgcccgacata

SEQ ID NO: 309 - DNA, 36 bp, Artificial Sequence
  Synthetic oligonucleotide
gtgcaacactaagttgaccggattgagtctagcgaa

SEQ ID NO: 310 - DNA, 35 bp, Artificial Sequence
  Synthetic oligonucleotide
gactgcagggtgtcacctctaccgtgccatgaggt

SEQ ID NO: 311 - DNA, 35 bp, Artificial Sequence
  Synthetic oligonucleotide
ttcgtagtaccaatagtcagtaatgccctttcgcc

SEQ ID NO: 312 - DNA, 38 bp, Artificial Sequence
  Synthetic oligonucleotide
atgcactgtatgcgggctatgcgaatacctagttatga

SEQ ID NO: 313 - DNA, 36 bp, Artificial Sequence
  Synthetic oligonucleotide
cccggcgcgctacgggacgattatgagctcttgcaa

SEQ ID NO: 314 - DNA, 35 bp, Artificial Sequence
  Synthetic oligonucleotide
catgcgcacaggctttttaatctccatgaagtttc

SEQ ID NO: 315 - DNA, 38 bp, Artificial Sequence
  Synthetic oligonucleotide
gcgggcttacacgtactggaggggttgcatgccattga

SEQ ID NO: 316 - DNA, 35 bp, Artificial Sequence
  Synthetic oligonucleotide
gtcgtagtactcgcggtcaagagattccttatttc

SEQ ID NO: 317 - DNA, 35 bp, Artificial Sequence
  Synthetic oligonucleotide
cacgcgtgcttggcgacgttcacttgcgggcctat

SEQ ID NO: 318 - DNA, 36 bp, Artificial Sequence
  Synthetic oligonucleotide
gccacctcactccactgtgctatcttatcgccttca

SEQ ID NO: 319 - DNA, 36 bp, Artificial Sequence
  Synthetic oligonucleotide
cgtgtcctttgaccgtactgcgaaacgcctaccaaa

SEQ ID NO: 320 - DNA, 35 bp, Artificial Sequence
  Synthetic oligonucleotide
gaatcgtaacaaactgcaggcctatctctacttgt

SEQ ID NO: 321 - DNA, 37 bp, Artificial Sequence
  Synthetic oligonucleotide
gcaggaaacctctactgtgccttgtagtatactttga

SEQ ID NO: 322 - DNA, 38 bp, Artificial Sequence
  Synthetic oligonucleotide
gcagtccatagcgctcctggtctcctcttttgctttga

SEQ ID NO: 323 - DNA, 35 bp, Artificial Sequence
  Synthetic oligonucleotide
cgtgccactcaaatcctcctctaccgtgctttttt

SEQ ID NO: 324 - DNA, 35 bp, Artificial Sequence
  Synthetic oligonucleotide
tggagcacgccgccaatggacagtccaccttacct

SEQ ID NO: 325 - DNA, 35 bp, Artificial Sequence
  Synthetic oligonucleotide
gatgggcctgcgtgctaaggcgcgataacgggtgt

SEQ ID NO: 326 - DNA, 35 bp, Artificial Sequence
  Synthetic oligonucleotide
cgcgggccaggtctgcatgcatgcgaggtcacacc

SEQ ID NO: 327 - DNA, 37 bp, Artificial Sequence
  Synthetic oligonucleotide
gcgtgcttacgaacaaggtgcgtgcccgattctccga

SEQ ID NO: 328 - DNA, 36 bp, Artificial Sequence
  Synthetic oligonucleotide
tcagcggacctagcgaacgattgcggccaccactta

SEQ ID NO: 329 - DNA, 38 bp, Artificial Sequence
  Synthetic oligonucleotide
gccgcgcgtgccagcataatcgtactatgtctgcgtga

SEQ ID NO: 330 - DNA, 35 bp, Artificial Sequence
  Synthetic oligonucleotide
atcgtagaactagctagtctgcaatttctggttac

SEQ ID NO: 331 - DNA, 35 bp, Artificial Sequence
  Synthetic oligonucleotide
gccgcgtgcctggccaaactgggtcaacttttctc

SEQ ID NO: 332 - DNA, 38 bp, Artificial Sequence
  Synthetic oligonucleotide
tctatcgcgtgccagtgtacgtacggtgtcttatttga

SEQ ID NO: 333 - DNA, 35 bp, Artificial Sequence
  Synthetic oligonucleotide
ttacgttcccggactctactgtgcccctccctata

SEQ ID NO: 334 - DNA, 35 bp, Artificial Sequence
  Synthetic oligonucleotide
ccaaccgcgcgcctggggactacgtgacatctagc

SEQ ID NO: 335 - DNA, 36 bp, Artificial Sequence
  Synthetic oligonucleotide
tcgtagtactgctgctttgtgcgtccatactcgtta

SEQ ID NO: 336 - DNA, 37 bp, Artificial Sequence
  Synthetic oligonucleotide
atcgtagtactgcaactgggattattcacacactaga

SEQ ID NO: 337 - DNA, 36 bp, Artificial Sequence
  Synthetic oligonucleotide
gaattccgcgcgtagtcgagtactagggaaatcgaa

SEQ ID NO: 338 - DNA, 35 bp, Artificial Sequence
  Synthetic oligonucleotide
catgcggaccatgatttttattgagtttttgcttt

SEQ ID NO: 339 - DNA, 35 bp, Artificial Sequence
  Synthetic oligonucleotide
attcgagcggtcttgcgggtatccctccactgtgc

SEQ ID NO: 340 - DNA, 36 bp, Artificial Sequence
  Synthetic oligonucleotide
catgcgcattactctggtcaacttgccgaatcgaaa

SEQ ID NO: 341 - DNA, 37 bp, Artificial Sequence
  Synthetic oligonucleotide
gggcgtatcgtagccacgtacaagggttgcatattga

SEQ ID NO: 342 - DNA, 36 bp, Artificial Sequence
  Synthetic oligonucleotide
gcgagaagctttcaatcctcaaccttacgctttata

SEQ ID NO: 343 - DNA, 35 bp, Artificial Sequence
  Synthetic oligonucleotide
acgcctaagttgcctctaccgtgccgagccctcca

SEQ ID NO: 344 - DNA, 35 bp, Artificial Sequence
  Synthetic oligonucleotide
tgcggagctagcaacgagggtagagtgcgaattcc

SEQ ID NO: 345 - DNA, 35 bp, Artificial Sequence
  Synthetic oligonucleotide
gataagtcacggacggtttctctactgtgcctttt

SEQ ID NO: 346 - DNA, 36 bp, Artificial Sequence
  Synthetic oligonucleotide
gcgtgccaacaacctgcggacaaaagaccccctaaa

SEQ ID NO: 347 - DNA, 38 bp, Artificial Sequence
  Synthetic oligonucleotide
ggtcatgccgctaggggcgaactcctctgagcctgtga

SEQ ID NO: 348 - DNA, 38 bp, Artificial Sequence
  Synthetic oligonucleotide
cctcgcgcgccagggacgttgcaagttaaaccatatga

SEQ ID NO: 349 - DNA, 35 bp, Artificial Sequence
  Synthetic oligonucleotide
gcaggcgggccaggcttaatacacgcttctactta

SEQ ID NO: 350 - DNA, 34 bp, Artificial Sequence
  Synthetic oligonucleotide
atcgtagtaatgcagcaattgcaatactcctatt

SEQ ID NO: 351 - DNA, 36 bp, Artificial Sequence
  Synthetic oligonucleotide
accgaacctagggacgccccaggaatcacaatgtta

SEQ ID NO: 352 - DNA, 35 bp, Artificial Sequence
  Synthetic oligonucleotide
tactgctaactttcactctaccgtgcaaaccacca

SEQ ID NO: 353 - DNA, 35 bp, Artificial Sequence
  Synthetic oligonucleotide
cccggaagtgggttcgagctgcatcgtgtcaggcc

SEQ ID NO: 354 - DNA, 36 bp, Artificial Sequence
  Synthetic oligonucleotide
tagtaacttcatgcccccagtggaactcctctgaca

SEQ ID NO: 355 - DNA, 35 bp, Artificial Sequence
  Synthetic oligonucleotide
gtccacgcgtgcctgaggacacagccaggaaactt

SEQ ID NO: 356 - DNA, 36 bp, Artificial Sequence
  Synthetic oligonucleotide
aatcgctggccagaaagttagcagtcgaggcccaaa

SEQ ID NO: 357 - DNA, 36 bp, Artificial Sequence
  Synthetic oligonucleotide
agggcgtgccacctcgaacacgcaggtaatttttca

SEQ ID NO: 358 - DNA, 35 bp, Artificial Sequence
  Synthetic oligonucleotide
tcacctaccatgtccgagtaacactcgcccctcca

SEQ ID NO: 359 - DNA, 35 bp, Artificial Sequence
  Synthetic oligonucleotide
cgtggccggtggtccgtactgccaaaatatttaca

SEQ ID NO: 360 - DNA, 35 bp, Artificial Sequence
  Synthetic oligonucleotide
cgcgtgccagcggactttcaccatgcgatacgtgg

SEQ ID NO: 361 - DNA, 36 bp, Artificial Sequence
  Synthetic oligonucleotide
gagttaaagctatctctaccgtgccccctaaagtta

SEQ ID NO: 362 - DNA, 36 bp, Artificial Sequence
  Synthetic oligonucleotide
tatcgcgcgccagaagagtaagcaagtcatgaccca

SEQ ID NO: 363 - DNA, 37 bp, Artificial Sequence
  Synthetic oligonucleotide
tgaccaagggttccgctgtggggatacggttaaggga

SEQ ID NO: 364 - DNA, 36 bp, Artificial Sequence
  Synthetic oligonucleotide
agccggagctaggctagtgcgcaccagtcaaaccta

SEQ ID NO: 365 - DNA, 38 bp, Artificial Sequence
  Synthetic oligonucleotide
tcgtagtattgcaagggcaccttactcccaccatttga

SEQ ID NO: 366 - DNA, 35 bp, Artificial Sequence
  Synthetic oligonucleotide
gcgcagcttatcgccatccgcaaatccacacgctt

SEQ ID NO: 367 - DNA, 37 bp, Artificial Sequence
  Synthetic oligonucleotide
cccacgcgtgcctgtggatggcgcactcgggcataga

SEQ ID NO: 368 - DNA, 36 bp, Artificial Sequence
  Synthetic oligonucleotide
caaggagcacgtatgcactgtgcgagttggtccgta

SEQ ID NO: 369 - DNA, 36 bp, Artificial Sequence
  Synthetic oligonucleotide
agttagtctctaccgtgcccattattccgttctgaa

SEQ ID NO: 370 - DNA, 35 bp, Artificial Sequence
  Synthetic oligonucleotide
gcctgtgaaccttaaactctaccgtgcctctttgt

SEQ ID NO: 371 - DNA, 36 bp, Artificial Sequence
  Synthetic oligonucleotide
gctaaccaagtcatgggaccacgctctattgggata

SEQ ID NO: 372 - DNA, 35 bp, Artificial Sequence
  Synthetic oligonucleotide
gcaggcattattagtgtctctaccgtgctctggac

SEQ ID NO: 373 - DNA, 38 bp, Artificial Sequence
  Synthetic oligonucleotide
taccgcgcgcctggtagttgcagtattcctttgtttga

SEQ ID NO: 374 - DNA, 35 bp, Artificial Sequence
  Synthetic oligonucleotide
taacctaccaggccatgcgcaggactgtaatgcca

SEQ ID NO: 375 - DNA, 36 bp, Artificial Sequence
  Synthetic oligonucleotide
gcgccacatcgcaagcttatcgacaccccgctttca

SEQ ID NO: 376 - DNA, 35 bp, Artificial Sequence
  Synthetic oligonucleotide
cccggggctagggatcgggtgcaatcattgaattt

SEQ ID NO: 377 - DNA, 35 bp, Artificial Sequence
  Synthetic oligonucleotide
gcgagcctagcccgtaactggaaggccactactct

SEQ ID NO: 378 - DNA, 37 bp, Artificial Sequence
  Synthetic oligonucleotide
gacgggtgcgggctagcaagctttacctctattatga

SEQ ID NO: 379 - DNA, 35 bp, Artificial Sequence
  Synthetic oligonucleotide
gcgtgccaacgtgactgtgtcgcctttgctctgta

SEQ ID NO: 380 - DNA, 35 bp, Artificial Sequence
  Synthetic oligonucleotide
atcgtaggactgcgaaatcattgcgggtttattgt

SEQ ID NO: 381 - DNA, 35 bp, Artificial Sequence
  Synthetic oligonucleotide
ttacctaccaaggcacgccgttttatataaggtgg

SEQ ID NO: 382 - DNA, 35 bp, Artificial Sequence
  Synthetic oligonucleotide
ccgcgtgcttggattgtgcagtcctccctctgact

SEQ ID NO: 383 - DNA, 36 bp, Artificial Sequence
  Synthetic oligonucleotide
ttacctaccagtgcatggcgataagtctttcctata

SEQ ID NO: 384 - DNA, 35 bp, Artificial Sequence
  Synthetic oligonucleotide
gacgtctgcaggtgagcattggtctacttattggt

SEQ ID NO: 385 - DNA, 38 bp, Artificial Sequence
  Synthetic oligonucleotide
cgcgatcgtagcagtacggaggttcttctagcatatga

SEQ ID NO: 386 - DNA, 35 bp, Artificial Sequence
  Synthetic oligonucleotide
cgcgaatcgtagccgacgtgcttgggcttgcgacc

SEQ ID NO: 387 - DNA, 36 bp, Artificial Sequence
  Synthetic oligonucleotide
aagcacggtacgcacagtccgacttttgccttcaaa

SEQ ID NO: 388 - DNA, 35 bp, Artificial Sequence
  Synthetic oligonucleotide
tccggaactaggagacgtacacgccgcaatgcccc

SEQ ID NO: 389 - DNA, 35 bp, Artificial Sequence
  Synthetic oligonucleotide
ccgcggacctagcgaggacagcgcattgctagcta

SEQ ID NO: 390 - DNA, 35 bp, Artificial Sequence
  Synthetic oligonucleotide
agcccgcgtgcctgggagacgacctccgacttgcg

SEQ ID NO: 391 - DNA, 35 bp, Artificial Sequence
  Synthetic oligonucleotide
gcgtgctaaggtactgtacagtctacgcctatgtt

SEQ ID NO: 392 - DNA, 38 bp, Artificial Sequence
  Synthetic oligonucleotide
taccgcgatactgcacgtgtgcgaccgcttttccttga

SEQ ID NO: 393 - DNA, 36 bp, Artificial Sequence
  Synthetic oligonucleotide
tgacctaccaaggagagtttcatttgatctaaacta

SEQ ID NO: 394 - DNA, 35 bp, Artificial Sequence
  Synthetic oligonucleotide
cttagtgccctaagtctgcgtgactctactgtgcc

SEQ ID NO: 395 - DNA, 36 bp, Artificial Sequence
  Synthetic oligonucleotide
tgcaggcagagcccgttaagctttttatcaactcca

SEQ ID NO: 396 - DNA, 35 bp, Artificial Sequence
  Synthetic oligonucleotide
gaggcgaatcgtagctccacgtggtgccatgcaga

SEQ ID NO: 397 - DNA, 35 bp, Artificial Sequence
  Synthetic oligonucleotide
catccgctagttgcttttaatgaccaccgcttcca

SEQ ID NO: 398 - DNA, 36 bp, Artificial Sequence
  Synthetic oligonucleotide
aagcactgtacaaactggatgcgtacacttcctcca

SEQ ID NO: 399 - DNA, 35 bp, Artificial Sequence
  Synthetic oligonucleotide
gcgtgccaaggtacggaaggtccatgcaacggttt

SEQ ID NO: 400 - DNA, 36 bp, Artificial Sequence
  Synthetic oligonucleotide
cgtgtaccgcttgtaccgtacaaagtcaccttgtta

SEQ ID NO: 401 - DNA, 36 bp, Artificial Sequence
  Synthetic oligonucleotide
catgcgcgctccactggtcttaattttcctccatga

SEQ ID NO: 402 - DNA, 37 bp, Artificial Sequence
  Synthetic oligonucleotide
tctgcgtgctaagagcggccctgtagttgcgccttga

SEQ ID NO: 403 - DNA, 36 bp, Artificial Sequence
  Synthetic oligonucleotide
gcgtgccaacgattctgcgctgggctagtaccatta

SEQ ID NO: 404 - DNA, 35 bp, Artificial Sequence
  Synthetic oligonucleotide
gcgcgctaacggacaaatcccctaacctcgataaa

SEQ ID NO: 405 - DNA, 35 bp, Artificial Sequence
  Synthetic oligonucleotide
attctctaccgtgccacattttatcctctgcaaac

SEQ ID NO: 406 - DNA, 37 bp, Artificial Sequence
  Synthetic oligonucleotide
tgtctggatgccatgcgccacgcttttctcactatga

SEQ ID NO: 407 - DNA, 37 bp, Artificial Sequence
  Synthetic oligonucleotide
atcgtagtgctgcaggatctacctacattattctgga

SEQ ID NO: 408 - DNA, 36 bp, Artificial Sequence
  Synthetic oligonucleotide
gcagtctcatctgtcttctctaccgtgctcgaatca

SEQ ID NO: 409 - DNA, 35 bp, Artificial Sequence
  Synthetic oligonucleotide
gtctccggcgatatctccactgtgcccttctctat

SEQ ID NO: 410 - DNA, 35 bp, Artificial Sequence
  Synthetic oligonucleotide
gcaagtcattccagtcctgactctaccgtgcttac

SEQ ID NO: 411 - DNA, 35 bp, Artificial Sequence
  Synthetic oligonucleotide
gtgatggtcgtgcccgctttatcttacatctgctt

SEQ ID NO: 412 - DNA, 35 bp, Artificial Sequence
  Synthetic oligonucleotide
gcgtcgacgagatttttgacctctaccgtgccgac

SEQ ID NO: 413 - DNA, 35 bp, Artificial Sequence
  Synthetic oligonucleotide
tgcgtcaggcgtccgcttttaccccaccatgcttt

SEQ ID NO: 414 - DNA, 37 bp, Artificial Sequence
  Synthetic oligonucleotide
atgacacgcgcgcctgctagtactgcgctccatgcga

SEQ ID NO: 415 - DNA, 36 bp, Artificial Sequence
  Synthetic oligonucleotide
ggtcaagcattgcgactctaccgtgcctcaaactaa

SEQ ID NO: 416 - DNA, 35 bp, Artificial Sequence
  Synthetic oligonucleotide
cacgtactgtttactctaccgtgcattaaacgttt

SEQ ID NO: 417 - DNA, 35 bp, Artificial Sequence
  Synthetic oligonucleotide
agcaggcccttttcacatactctctactgtgctcc

SEQ ID NO: 418 - DNA, 35 bp, Artificial Sequence
  Synthetic oligonucleotide
taatgcaggagtgtgccaagcttttatttcatgtc

SEQ ID NO: 419 - DNA, 38 bp, Artificial Sequence
  Synthetic oligonucleotide
catgcgaccgctttacctacataggattactcttctga

SEQ ID NO: 420 - DNA, 35 bp, Artificial Sequence
  Synthetic oligonucleotide
ttgcggatctagcaacgaatggaaggaacacgtac

SEQ ID NO: 421 - DNA, 35 bp, Artificial Sequence
  Synthetic oligonucleotide
atcgtagtacccgcgggaaaaaaccacttatcatc

SEQ ID NO: 422 - DNA, 35 bp, Artificial Sequence
  Synthetic oligonucleotide
tcgctgcaccgtgtccatgcggctacaccaattcg

SEQ ID NO: 423 - DNA, 35 bp, Artificial Sequence
  Synthetic oligonucleotide
gcagaataccttactctaccgtgccattaatacat

SEQ ID NO: 424 - DNA, 38 bp, Artificial Sequence
  Synthetic oligonucleotide
gcgccgaatagcctctactgtgcgttaccctggattga

SEQ ID NO: 425 - DNA, 35 bp, Artificial Sequence
  Synthetic oligonucleotide
gcaggccgtatcactctaccgtgcaaaaagtatac

SEQ ID NO: 426 - DNA, 37 bp, Artificial Sequence
  Synthetic oligonucleotide
tactgaggcgacaattctctaccgtgcccccatttga

SEQ ID NO: 427 - DNA, 37 bp, Artificial Sequence
  Synthetic oligonucleotide
gccactagtatcctccactgtgcaaaattacaataga

SEQ ID NO: 428 - DNA, 38 bp, Artificial Sequence
  Synthetic oligonucleotide
ggtattgccgtgtagttcgttctctactgtgcctttga

SEQ ID NO: 429 - DNA, 35 bp, Artificial Sequence
  Synthetic oligonucleotide
cttgcgagattagctttatcacctgttttccgctt

SEQ ID NO: 430 - DNA, 35 bp, Artificial Sequence
  Synthetic oligonucleotide
gcacctctactgtgcccacaacgaattggactcac

SEQ ID NO: 431 - DNA, 35 bp, Artificial Sequence
  Synthetic oligonucleotide
ctccgcggtcatccactgctccattcaactcgcct

SEQ ID NO: 432 - DNA, 35 bp, Artificial Sequence
  Synthetic oligonucleotide
aatctccaccgtgcactatcttgtctcaaagtttc

SEQ ID NO: 433 - DNA, 36 bp, Artificial Sequence
  Synthetic oligonucleotide
gctagctgaattcaccatatctctactgtgcactaa

SEQ ID NO: 434 - DNA, 37 bp, Artificial Sequence
  Synthetic oligonucleotide
ctgcgtgctaagacgtacggtgtcaacatctctccga

SEQ ID NO: 435 - DNA, 35 bp, Artificial Sequence
  Synthetic oligonucleotide
gcgacgggacttagcttatattagatttcgcttct

SEQ ID NO: 436 - DNA, 36 bp, Artificial Sequence
  Synthetic oligonucleotide
catgcggaagcttactcatttttattcgattaccaa

SEQ ID NO: 437 - DNA, 35 bp, Artificial Sequence
  Synthetic oligonucleotide
taacctaccaagcaatcaccgttttggaaatcatt

SEQ ID NO: 438 - DNA, 36 bp, Artificial Sequence
  Synthetic oligonucleotide
gcccagaaaaactctactgtgcgatgacctgttaaa

SEQ ID NO: 439 - DNA, 36 bp, Artificial Sequence
  Synthetic oligonucleotide
tccgcgtgcctggaaaggtactgtccacttgaacaa

SEQ ID NO: 440 - DNA, 38 bp, Artificial Sequence
  Synthetic oligonucleotide
gagtttgcaggcttggggactctactgtgcaattttga

SEQ ID NO: 441 - DNA, 36 bp, Artificial Sequence
  Synthetic oligonucleotide
ttcgcctccaccgtgcatttctaactttatttctta

SEQ ID NO: 442 - DNA, 35 bp, Artificial Sequence
  Synthetic oligonucleotide
ccctcggactgagcactgcatacaagaagccttgc

SEQ ID NO: 443 - DNA, 37 bp, Artificial Sequence
  Synthetic oligonucleotide
cccgtgcctccccttatctctaccgtgcctcctatga

SEQ ID NO: 444 - DNA, 36 bp, Artificial Sequence
  Synthetic oligonucleotide
actcagtcatcgtacgctttccgatatcgctttata

SEQ ID NO: 445 - DNA, 35 bp, Artificial Sequence
  Synthetic oligonucleotide
tacgcgtgccaggaactgtaccagtcttatgccgc

SEQ ID NO: 446 - DNA, 36 bp, Artificial Sequence
  Synthetic oligonucleotide
gcggatttggtctctaccgtgcctactactagttaa

SEQ ID NO: 447 - DNA, 38 bp, Artificial Sequence
  Synthetic oligonucleotide
ggcacggaatgcatcgtgtcatggcgtctttcccctga

SEQ ID NO: 448 - DNA, 35 bp, Artificial Sequence
  Synthetic oligonucleotide
gtgcaggccacccagatctctactgtgcctcttac

SEQ ID NO: 449 - DNA, 35 bp, Artificial Sequence
  Synthetic oligonucleotide
atcgtaggactgcacatcgtagtttagttactcac

SEQ ID NO: 450 - DNA, 35 bp, Artificial Sequence
  Synthetic oligonucleotide
tcacctacaaatgtcaggcatatactactctatta

SEQ ID NO: 451 - DNA, 36 bp, Artificial Sequence
  Synthetic oligonucleotide
gtacaagcagtttggcgtatatctctactgtgctga

SEQ ID NO: 452 - DNA, 35 bp, Artificial Sequence
  Synthetic oligonucleotide
gataacgtttgattactccactgtgccataccctt

SEQ ID NO: 453 - DNA, 37 bp, Artificial Sequence
  Synthetic oligonucleotide
tgagcgatcgtagccaacgtactgcctttcctattga

SEQ ID NO: 454 - DNA, 35 bp, Artificial Sequence
  Synthetic oligonucleotide
gcgtcgaccacgttaatatttaccctctactgtgc

SEQ ID NO: 455 - DNA, 35 bp, Artificial Sequence
  Synthetic oligonucleotide
gcctggtcaactcgccgcaatacttttacccatcc

SEQ ID NO: 456 - DNA, 37 bp, Artificial Sequence
  Synthetic oligonucleotide
gtcaccctaaccgtattctccaccgtgccttacttga

SEQ ID NO: 457 - DNA, 35 bp, Artificial Sequence
  Synthetic oligonucleotide
gatagaattgagctctactgtgcctatctggttat

SEQ ID NO: 458 - DNA, 35 bp, Artificial Sequence
  Synthetic oligonucleotide
gtccaaattagctctctactgtgcctatccgttaa

SEQ ID NO: 459 - DNA, 37 bp, Artificial Sequence
  Synthetic oligonucleotide
gcgcacttgttcttcttggtcgcggcgtgccacgcga

SEQ ID NO: 460 - DNA, 36 bp, Artificial Sequence
  Synthetic oligonucleotide
gcggtcagagctaattctgtcaactcgccctttcta

SEQ ID NO: 461 - DNA, 36 bp, Artificial Sequence
  Synthetic oligonucleotide
gagcggaactagcgatgcgtacaaggttaatttcta

SEQ ID NO: 462 - DNA, 35 bp, Artificial Sequence
  Synthetic oligonucleotide
aacactctactgtgcctccacgatattttcatact

SEQ ID NO: 463 - DNA, 35 bp, Artificial Sequence
  Synthetic oligonucleotide
gtagtgatgccacctcaactgtgcccttgttttct

SEQ ID NO: 464 - DNA, 36 bp, Artificial Sequence
  Synthetic oligonucleotide
ttcctgcagttctattctctactgtgccctttgtta

SEQ ID NO: 465 - DNA, 37 bp, Artificial Sequence
  Synthetic oligonucleotide
gactgctctcatagtatgaactccactgtgcccttga

SEQ ID NO: 466 - DNA, 38 bp, Artificial Sequence
  Synthetic oligonucleotide
accatgcgcgcaaccttctctaccgtgcatctttttga

SEQ ID NO: 467 - DNA, 36 bp, Artificial Sequence
  Synthetic oligonucleotide
gcgttatacctccactgtgctcaattttcatctaaa

SEQ ID NO: 468 - DNA, 38 bp, Artificial Sequence
  Synthetic oligonucleotide
acgcgtgcctggtttactgcagacgagccccttcatga

SEQ ID NO: 469 - DNA, 38 bp, Artificial Sequence
  Synthetic oligonucleotide
gcacacacactttactctaccgtgccattttgaagtga

SEQ ID NO: 470 - DNA, 38 bp, Artificial Sequence
  Synthetic oligonucleotide
atctgcgggcatccatagataatactctactgtgctga

SEQ ID NO: 471 - DNA, 35 bp, Artificial Sequence
  Synthetic oligonucleotide
aaatcattcctgtggtctctctaccgtgccaatat

SEQ ID NO: 472 - DNA, 36 bp, Artificial Sequence
  Synthetic oligonucleotide
gccataacctatctctactgtgctaaaccggttaca

SEQ ID NO: 473 - DNA, 38 bp, Artificial Sequence
  Synthetic oligonucleotide
gcgactctacggaaatttgggatctctaccgtgcctga

SEQ ID NO: 474 - DNA, 35 bp, Artificial Sequence
  Synthetic oligonucleotide
acctctactgtgccgattccattgttcttccactc

SEQ ID NO: 475 - DNA, 35 bp, Artificial Sequence
  Synthetic oligonucleotide
gcgaccaagccattccaaactagccctgatttcaa

SEQ ID NO: 476 - DNA, 36 bp, Artificial Sequence
  Synthetic oligonucleotide
ctgtacggctgtctgggcctagtattcccgctttaa

SEQ ID NO: 477 - DNA, 36 bp, Artificial Sequence
  Synthetic oligonucleotide
gggaactgcaggttaaactctactgtgctatgttta

SEQ ID NO: 478 - DNA, 36 bp, Artificial Sequence
  Synthetic oligonucleotide
gcgtgggttcctctaccgtgccgaggttgttcctaa

SEQ ID NO: 479 - DNA, 38 bp, Artificial Sequence
  Synthetic oligonucleotide
tcgcggtcagcaattctccaccgtgcgattacctttga

SEQ ID NO: 480 - DNA, 36 bp, Artificial Sequence
  Synthetic oligonucleotide
tacacgtcaccttactctactgtgccgtaatcctca

SEQ ID NO: 481 - DNA, 38 bp, Artificial Sequence
  Synthetic oligonucleotide
atgcactgtacgcaggtcacgcgttttaccactactga

SEQ ID NO: 482 - DNA, 38 bp, Artificial Sequence
  Synthetic oligonucleotide
gttgcgtgctaacacacgtgactgcctatttcctatga

SEQ ID NO: 483 - DNA, 38 bp, Artificial Sequence
  Synthetic oligonucleotide
gctactgcgataactctaccgtgccactcccttgttga

SEQ ID NO: 484 - DNA, 36 bp, Artificial Sequence
  Synthetic oligonucleotide
tatccaaccactagtaagcctccaccgtgccattta

SEQ ID NO: 485 - DNA, 37 bp, Artificial Sequence
  Synthetic oligonucleotide
gctagttaccagtaacctctaccgtgcctcttctgga

SEQ ID NO: 486 - DNA, 36 bp, Artificial Sequence
  Synthetic oligonucleotide
cggcgaactcctctgtagcagtcgtgcggttcataa

SEQ ID NO: 487 - DNA, 35 bp, Artificial Sequence
  Synthetic oligonucleotide
aactgcgtgcctagtacggacttgcacccttgtgg

SEQ ID NO: 488 - DNA, 35 bp, Artificial Sequence
  Synthetic oligonucleotide
gcaggatccgttctttcaactcgcctatttctgga

SEQ ID NO: 489 - DNA, 35 bp, Artificial Sequence
  Synthetic oligonucleotide
actgcgaagccttgcatccaattactctactgtgc

SEQ ID NO: 490 - DNA, 35 bp, Artificial Sequence
  Synthetic oligonucleotide
gcgataatcttgtcattactctaccgtgccgttta

SEQ ID NO: 491 - DNA, 36 bp, Artificial Sequence
  Synthetic oligonucleotide
atgccggcctattactacctaactctactgtgctta

SEQ ID NO: 492 - DNA, 37 bp, Artificial Sequence
  Synthetic oligonucleotide
gcgatcaagcgtatttcttcttacctctactgtgcga

SEQ ID NO: 493 - DNA, 38 bp, Artificial Sequence
  Synthetic oligonucleotide
gatgacacgccctttccactccactgtgcctgttttga

SEQ ID NO: 494 - DNA, 36 bp, Artificial Sequence
  Synthetic oligonucleotide
tacatactccactgtgccacctttcccgactttcca

SEQ ID NO: 495 - DNA, 35 bp, Artificial Sequence
  Synthetic oligonucleotide
catgcaagattttgcgtaacttaattaattgcttt

SEQ ID NO: 496 - DNA, 35 bp, Artificial Sequence
  Synthetic oligonucleotide
gcactatatccgtacctaaacctccactgtgcttt

SEQ ID NO: 497 - DNA, 35 bp, Artificial Sequence
  Synthetic oligonucleotide
gcgctataactccgatgtattctccaccgtgccca

SEQ ID NO: 498 - DNA, 36 bp, Artificial Sequence
  Synthetic oligonucleotide
atcgtagtgctgcaggaaacgagattgatgcaccca

SEQ ID NO: 499 - DNA, 35 bp, Artificial Sequence
  Synthetic oligonucleotide
tgcgagtgggatttcgtccgacacctcaccatgca

SEQ ID NO: 500 - DNA, 35 bp, Artificial Sequence
  Synthetic oligonucleotide
agggtcatctagaacggttgacacgaaccgttgct

SEQ ID NO: 501 - DNA, 35 bp, Artificial Sequence
  Synthetic oligonucleotide
gctaggaaaggacccaaatctctactgtgcctacc

SEQ ID NO: 502 - DNA, 35 bp, Artificial Sequence
  Synthetic oligonucleotide
gcgaggaatacctatctctactgtgccaccaaacg

SEQ ID NO: 503 - DNA, 36 bp, Artificial Sequence
  Synthetic oligonucleotide
gccgtttactctaccgtgccgtatcgatttccatta

SEQ ID NO: 504 - DNA, 35 bp, Artificial Sequence
  Synthetic oligonucleotide
aggtcgtgcgtcccgttcaactagccctgttctca

SEQ ID NO: 505 - DNA, 35 bp, Artificial Sequence
  Synthetic oligonucleotide
cattgcgttctggctttcgttcattttcgctttac

SEQ ID NO: 506 - DNA, 35 bp, Artificial Sequence
  Synthetic oligonucleotide
gcactcatcgcggattatctccaccgtgccgacct

SEQ ID NO: 507 - DNA, 35 bp, Artificial Sequence
  Synthetic oligonucleotide
catgccagctttaactttgagatctgttagttttc

SEQ ID NO: 508 - DNA, 36 bp, Artificial Sequence
  Synthetic oligonucleotide
gccaggatctcaactgtgccattgcctttttctgaa

SEQ ID NO: 509 - DNA, 38 bp, Artificial Sequence
  Synthetic oligonucleotide
ttacctccaccgtgccaatcactgtttgatcgccttga

SEQ ID NO: 510 - DNA, 36 bp, Artificial Sequence
  Synthetic oligonucleotide
taacctaccaagtccaatttggagtctctacgatta

SEQ ID NO: 511 - DNA, 35 bp, Artificial Sequence
  Synthetic oligonucleotide
gcctcaacttgagtttctatcattctccactgtgc

SEQ ID NO: 512 - DNA, 37 bp, Artificial Sequence
  Synthetic oligonucleotide
catagctgcatactctaccgtgcactcattccctaga

SEQ ID NO: 513 - DNA, 37 bp, Artificial Sequence
  Synthetic oligonucleotide
gacatcaactgcgaactcccctgagtgtgatatcgga

SEQ ID NO: 514 - DNA, 35 bp, Artificial Sequence
  Synthetic oligonucleotide
tatctccaccgtgcccgttaataatctgatctgaa

SEQ ID NO: 515 - DNA, 36 bp, Artificial Sequence
  Synthetic oligonucleotide
tgcgtgccaaacggactcaaggtaccatgcatcaca

SEQ ID NO: 516 - DNA, 36 bp, Artificial Sequence
  Synthetic oligonucleotide
acatagactgccgagcgttcttctctaccgtgccca

SEQ ID NO: 517 - DNA, 36 bp, Artificial Sequence
  Synthetic oligonucleotide
atgaccgaggtacccgacggcctcataggatccata

SEQ ID NO: 518 - DNA, 35 bp, Artificial Sequence
  Synthetic oligonucleotide
gcggttatggggttctcaactgtgccaatctccat

SEQ ID NO: 519 - DNA, 35 bp, Artificial Sequence
  Synthetic oligonucleotide
gggtcatgcgatttctttgttcactcaactcgccc

SEQ ID NO: 520 - DNA, 37 bp, Artificial Sequence
  Synthetic oligonucleotide
gctgttgcgtccatatctccactgtgcttttggttga

SEQ ID NO: 521 - DNA, 35 bp, Artificial Sequence
  Synthetic oligonucleotide
atgcgtgccaatacgacgtcaggccatgaagccat

SEQ ID NO: 522 - DNA, 36 bp, Artificial Sequence
  Synthetic oligonucleotide
atgaactggtggacctttatcctctactgtgcaaaa

SEQ ID NO: 523 - DNA, 35 bp, Artificial Sequence
  Synthetic oligonucleotide
ccgcgtgcctggaccttgcacgacatgcggcaata

SEQ ID NO: 524 - DNA, 38 bp, Artificial Sequence
  Synthetic oligonucleotide
tctgcgggctagtatctaatgatctctaccgtgcttga

SEQ ID NO: 525 - DNA, 34 bp, Artificial Sequence
  Synthetic oligonucleotide
catgcggaggcttttaacaccatgcattctcacc

SEQ ID NO: 526 - DNA, 37 bp, Artificial Sequence
  Synthetic oligonucleotide
ttacgtatctgagcgctagtaccagtacctcgagtga

SEQ ID NO: 527 - DNA, 35 bp, Artificial Sequence
  Synthetic oligonucleotide
agtcaggcccgcttttatttttgtggttatttttg

SEQ ID NO: 528 - DNA, 38 bp, Artificial Sequence
  Synthetic oligonucleotide
cttgccctccgacatgaactctactgtgcaacctatga

SEQ ID NO: 529 - DNA, 32 bp, Artificial Sequence
  Synthetic oligonucleotide
atcgcgtgccagaacgtaactcgcccatcgac

SEQ ID NO: 530 - DNA, 35 bp, Artificial Sequence
  Synthetic oligonucleotide
tgacgcgtgcttggcaacgtggcaggacaattatt

SEQ ID NO: 531 - DNA, 36 bp, Artificial Sequence
  Synthetic oligonucleotide
accgcgtgattggaagatactgcgtcttcgatttaa

SEQ ID NO: 532 - DNA, 35 bp, Artificial Sequence
  Synthetic oligonucleotide
gtgtgctgaccttagcaaccgaactgaggccctac

SEQ ID NO: 533 - DNA, 36 bp, Artificial Sequence
  Synthetic oligonucleotide
gcgcgccaaggtactgcggatagcgcattggacaca

SEQ ID NO: 534 - DNA, 35 bp, Artificial Sequence
  Synthetic oligonucleotide
taccgacgcgctattttctactctactgtgctcat

SEQ ID NO: 535 - DNA, 35 bp, Artificial Sequence
  Synthetic oligonucleotide
aaccgaacgtccgataaactcgccctactaatact

SEQ ID NO: 536 - DNA, 35 bp, Artificial Sequence
  Synthetic oligonucleotide
accaggtccactttcggtgatagaccctgcacaca

SEQ ID NO: 537 - DNA, 35 bp, Artificial Sequence
  Synthetic oligonucleotide
taaattgcccgtttgttctctactgtgccactccg

SEQ ID NO: 538 - DNA, 38 bp, Artificial Sequence
  Synthetic oligonucleotide
gccaccttgactctgatccaactctactgtgccattga

SEQ ID NO: 539 - DNA, 38 bp, Artificial Sequence
  Synthetic oligonucleotide
cgtgccaccgctggcttcctacttcgctttaactatga

SEQ ID NO: 540 - DNA, 35 bp, Artificial Sequence
  Synthetic oligonucleotide
tgttctctactgtgcccgataacacgcttttgttc

SEQ ID NO: 541 - DNA, 36 bp, Artificial Sequence
  Synthetic oligonucleotide
ctggtgctgcaccgtgtcacctatctttacgcatta

SEQ ID NO: 542 - DNA, 36 bp, Artificial Sequence
  Synthetic oligonucleotide
atcgtagtacgaagctagccataacctgttatctca

SEQ ID NO: 543 - DNA, 38 bp, Artificial Sequence
  Synthetic oligonucleotide
gcgtgttttatctctactgtgcgaacgtttggaattga

SEQ ID NO: 544 - DNA, 38 bp, Artificial Sequence
  Synthetic oligonucleotide
agctaggggtatctctactgtgcgattcttccgggtga

SEQ ID NO: 545 - DNA, 36 bp, Artificial Sequence
  Synthetic oligonucleotide
cgtgcccgctttattctccctggcttattggtccca

SEQ ID NO: 546 - DNA, 38 bp, Artificial Sequence
  Synthetic oligonucleotide
gatgcgccgctttacactcttgttcttacccgctttga

SEQ ID NO: 547 - DNA, 35 bp, Artificial Sequence
  Synthetic oligonucleotide
ggggcatgtaccaaccgttatttactctactgtgc

SEQ ID NO: 548 - DNA, 35 bp, Artificial Sequence
  Synthetic oligonucleotide
gcatcgtgtccatgcccaaatggttcgtcttttta

SEQ ID NO: 549 - DNA, 38 bp, Artificial Sequence
  Synthetic oligonucleotide
atgcactggacgcgcatgtcgtttcatttctccattga

SEQ ID NO: 550 - DNA, 34 bp, Artificial Sequence
  Synthetic oligonucleotide
aagcacgggctgcattcgattcaggtaaacaatt

SEQ ID NO: 551 - DNA, 37 bp, Artificial Sequence
  Synthetic oligonucleotide
acacccgcatgaggtatcctgtggatcgtgggacgga

SEQ ID NO: 552 - DNA, 35 bp, Artificial Sequence
  Synthetic oligonucleotide
gccagctttcgttcatataccactatcgctttgta

SEQ ID NO: 553 - DNA, 38 bp, Artificial Sequence
  Synthetic oligonucleotide
acagtcataacagactccgctgcgtgctaagcggatga

SEQ ID NO: 554 - DNA, 36 bp, Artificial Sequence
  Synthetic oligonucleotide
gcgcgctaacgggtatctgcaggtcctactagttta

SEQ ID NO: 555 - DNA, 35 bp, Artificial Sequence
  Synthetic oligonucleotide
atgcacctgtctgtcagtccccgctaggccatatt

SEQ ID NO: 556 - DNA, 38 bp, Artificial Sequence
  Synthetic oligonucleotide
ccatgcgcccggttgagatttaacggatctcgctttga

SEQ ID NO: 557 - DNA, 35 bp, Artificial Sequence
  Synthetic oligonucleotide
gcacacctcgctttaacacttgtaactacgcttca

SEQ ID NO: 558 - DNA, 35 bp, Artificial Sequence
  Synthetic oligonucleotide
tcacctactaaggactgatagctgcctacattgtt

SEQ ID NO: 559 - DNA, 36 bp, Artificial Sequence
  Synthetic oligonucleotide
ccacgagtctaggggcgtaacgcagtaaggcataca

SEQ ID NO: 560 - DNA, 38 bp, Artificial Sequence
  Synthetic oligonucleotide
acatgcgtgctaaggtactactggtgtcgaacctttga

SEQ ID NO: 561 - DNA, 35 bp, Artificial Sequence
  Synthetic oligonucleotide
atcgtagtacatacagtgcgtttcgtaaattgcct

SEQ ID NO: 562 - DNA, 35 bp, Artificial Sequence
  Synthetic oligonucleotide
gcgccccgactgccactagcttttaattctcgctt

SEQ ID NO: 563 - DNA, 36 bp, Artificial Sequence
  Synthetic oligonucleotide
tgctagctggcccatactcaactgtgcgttactcaa

SEQ ID NO: 564 - DNA, 35 bp, Artificial Sequence
  Synthetic oligonucleotide
actctgcatccttcaactctactgtgcggttattt

SEQ ID NO: 565 - DNA, 38 bp, Artificial Sequence
  Synthetic oligonucleotide
gctaactgcagggcacacaatctcttaaggcttaatga

SEQ ID NO: 566 - DNA, 35 bp, Artificial Sequence
  Synthetic oligonucleotide
gcgtgggcctggtctttactactaaacaaattggt

SEQ ID NO: 567 - DNA, 35 bp, Artificial Sequence
  Synthetic oligonucleotide
gatcgtaacgcactgagggtcaggcattacccgcc

SEQ ID NO: 568 - DNA, 37 bp, Artificial Sequence
  Synthetic oligonucleotide
gcccggggctaggggaaagaacctgccggtcatggga

SEQ ID NO: 569 - DNA, 35 bp, Artificial Sequence
  Synthetic oligonucleotide
gcgacctagggtaacgatcgtagttcacccataat

SEQ ID NO: 570 - DNA, 36 bp, Artificial Sequence
  Synthetic oligonucleotide
ttacctaccacagtctccgcctcgttatccttatca

SEQ ID NO: 571 - DNA, 36 bp, Artificial Sequence
  Synthetic oligonucleotide
gccgcgtgcctggccgtggtgcatcactaagttgaa

SEQ ID NO: 572 - DNA, 35 bp, Artificial Sequence
  Synthetic oligonucleotide
ggcgcgcgctagccatacgaactgcttgaacattt

SEQ ID NO: 573 - DNA, 37 bp, Artificial Sequence
  Synthetic oligonucleotide
tgcgaatcgtagccatcgtccactgctgatttgcgga

SEQ ID NO: 574 - DNA, 36 bp, Artificial Sequence
  Synthetic oligonucleotide
gcgaccgattcttctctcaaacgcttacttctatga

SEQ ID NO: 575 - DNA, 35 bp, Artificial Sequence
  Synthetic oligonucleotide
gccaaatgatctccactgtgcgaaatgggcttttt

SEQ ID NO: 576 - DNA, 38 bp, Artificial Sequence
  Synthetic oligonucleotide
tgagcacacaatggacgtgacaccaatctttcttatga

SEQ ID NO: 577 - DNA, 36 bp, Artificial Sequence
  Synthetic oligonucleotide
tcatcacgcgctagtgaacgtgttgtagcaccccta

SEQ ID NO: 578 - DNA, 36 bp, Artificial Sequence
  Synthetic oligonucleotide
tcatgtgcgtgccaactgacgaggtgcaggctagcc

SEQ ID NO: 579 - DNA, 38 bp, Artificial Sequence
  Synthetic oligonucleotide
atcgtagctgctgcagtcccctgtcttaatatccctga

SEQ ID NO: 580 - DNA, 36 bp, Artificial Sequence
  Synthetic oligonucleotide
cgtatcgtagacgttacggaaggagataatgcgcaa

SEQ ID NO: 581 - DNA, 36 bp, Artificial Sequence
  Synthetic oligonucleotide
cttgccagctttccttgtcttcgctttcattacata

SEQ ID NO: 582 - DNA, 38 bp, Artificial Sequence
  Synthetic oligonucleotide
gctgtcattgaatctctactgtgcgatccactttttga

SEQ ID NO: 583 - DNA, 38 bp, Artificial Sequence
  Synthetic oligonucleotide
catgcgccagcttcttctgattttatctatctctatga

SEQ ID NO: 584 - DNA, 36 bp, Artificial Sequence
  Synthetic oligonucleotide
ccatgcccgcttaagcttcttttctatgtttctacg

SEQ ID NO: 585 - DNA, 35 bp, Artificial Sequence
  Synthetic oligonucleotide
tagcaggagtaccctccaccgtgcacattgtttcc

SEQ ID NO: 586 - DNA, 37 bp, Artificial Sequence
  Synthetic oligonucleotide
catgcccgctttgtttctccgctttttggtattccga

SEQ ID NO: 587 - DNA, 36 bp, Artificial Sequence
  Synthetic oligonucleotide
atgcacgtcgaaaggcatgcggtacaactcctatga

SEQ ID NO: 588 - DNA, 35 bp, Artificial Sequence
  Synthetic oligonucleotide
agacagcaggcatagcggggaacctctaccgtgcc

SEQ ID NO: 589 - DNA, 35 bp, Artificial Sequence
  Synthetic oligonucleotide
aagtaacgcgggttacaactttttctccaccgtgc

SEQ ID NO: 590 - DNA, 36 bp, Artificial Sequence
  Synthetic oligonucleotide
acagtctcatgcccgcttttaatcataccgcttaca

SEQ ID NO: 591 - DNA, 38 bp, Artificial Sequence
  Synthetic oligonucleotide
gcgcccgaccattccctaagcttttgaccccactatga

SEQ ID NO: 592 - DNA, 37 bp, Artificial Sequence
  Synthetic oligonucleotide
gcgacgactatcgcttgttcttgaatacctcgcttta

SEQ ID NO: 593 - DNA, 34 bp, Artificial Sequence
  Synthetic oligonucleotide
aaactctactgtgcctcagtttcaaaccggttct

SEQ ID NO: 594 - DNA, 35 bp, Artificial Sequence
  Synthetic oligonucleotide
gtcgtagtactgcgaaatgggccatgcgcaaactt

SEQ ID NO: 595 - DNA, 35 bp, Artificial Sequence
  Synthetic oligonucleotide
cgtgcggatttctccaccgtgcttttgacctctga

SEQ ID NO: 596 - DNA, 38 bp, Artificial Sequence
  Synthetic oligonucleotide
gactgcgacctacacttatttgctctactgtgccttga

SEQ ID NO: 597 - DNA, 35 bp, Artificial Sequence
  Synthetic oligonucleotide
catgcggcttctaccaggtcaaactagccccaatt

SEQ ID NO: 598 - DNA, 36 bp, Artificial Sequence
  Synthetic oligonucleotide
aaccggagctaggtacgtgtctgtcaggcatgaaga

SEQ ID NO: 599 - DNA, 36 bp, Artificial Sequence
  Synthetic oligonucleotide
atgagtccgcgtgcctggacctttacccccgacgaa

SEQ ID NO: 600 - DNA, 38 bp, Artificial Sequence
  Synthetic oligonucleotide
catgccgtacgcttattggatacaccatcgctttttga

SEQ ID NO: 601 - DNA, 37 bp, Artificial Sequence
  Synthetic oligonucleotide
gcgttggtgttcctctctactgtgcctgattttttga

SEQ ID NO: 602 - DNA, 37 bp, Artificial Sequence
  Synthetic oligonucleotide
atcgtagtactgcacgggtgccacgtgtcttcccaga

SEQ ID NO: 603 - DNA, 35 bp, Artificial Sequence
  Synthetic oligonucleotide
aggcacgtacaggcatcgaccgctttcttctttcc

SEQ ID NO: 604 - DNA, 36 bp, Artificial Sequence
  Synthetic oligonucleotide
gccatgcgggataatattaaatcctctaccgtgcca

SEQ ID NO: 605 - DNA, 37 bp, Artificial Sequence
  Synthetic oligonucleotide
tctgccatgcggctcattccgaaactctactgtgcga

SEQ ID NO: 606 - DNA, 35 bp, Artificial Sequence
  Synthetic oligonucleotide
ttttgcgattcctctactgtgccttctggttttgt

SEQ ID NO: 607 - DNA, 35 bp, Artificial Sequence
  Synthetic oligonucleotide
ctgcagcaatcatgcaggctttcatcgctttcatc

SEQ ID NO: 608 - DNA, 35 bp, Artificial Sequence
  Synthetic oligonucleotide
tcacctaccaagatctctcgcgccctatagtttct

SEQ ID NO: 609 - DNA, 35 bp, Artificial Sequence
  Synthetic oligonucleotide
caccgcgtgccaggggatcggaatgatatcaactg

SEQ ID NO: 610 - DNA, 36 bp, Artificial Sequence
  Synthetic oligonucleotide
taaactaccaagggcatgccaccatctactacatga

SEQ ID NO: 611 - DNA, 35 bp, Artificial Sequence
  Synthetic oligonucleotide
atcgtagtactgaaaagcgggatccagttctaatt

SEQ ID NO: 612 - DNA, 35 bp, Artificial Sequence
  Synthetic oligonucleotide
gaaggcaagcacccccctgctcaactagccaacaa

SEQ ID NO: 613 - DNA, 38 bp, Artificial Sequence
  Synthetic oligonucleotide
ctgccctcgttctccaccgtgcccactttgtaaactga

SEQ ID NO: 614 - DNA, 36 bp, Artificial Sequence
  Synthetic oligonucleotide
gatgcaagggcccgttagtactggggtctaattaaa

SEQ ID NO: 615 - DNA, 38 bp, Artificial Sequence
  Synthetic oligonucleotide
catgcgatggtcttgcacttggttagtaatctccttga

SEQ ID NO: 616 - DNA, 35 bp, Artificial Sequence
  Synthetic oligonucleotide
gtgcgcgctaacacggagagtctcaacttaacctg

SEQ ID NO: 617 - DNA, 36 bp, Artificial Sequence
  Synthetic oligonucleotide
aacaaattgccgtggggacgtggtcatgcggattta

SEQ ID NO: 618 - DNA, 36 bp, Artificial Sequence
  Synthetic oligonucleotide
gcgtggcacgaagctttctatttttacttgattcca

SEQ ID NO: 619 - DNA, 35 bp, Artificial Sequence
  Synthetic oligonucleotide
caatgccagcttacgtttatatcccaattcgcttt

SEQ ID NO: 620 - DNA, 35 bp, Artificial Sequence
  Synthetic oligonucleotide
aacggtcatgccagcttttggtacttagttctcct

SEQ ID NO: 621 - DNA, 37 bp, Artificial Sequence
  Synthetic oligonucleotide
gaacgcaggcatccgcattagctttttccttctatga

SEQ ID NO: 622 - DNA, 36 bp, Artificial Sequence
  Synthetic oligonucleotide
gcgccccgtacagcatcgtgtcatggacctacccta

SEQ ID NO: 623 - DNA, 37 bp, Artificial Sequence
  Synthetic oligonucleotide
tcgtagtaactgcaggatccactccactctcatttga

SEQ ID NO: 624 - DNA, 35 bp, Artificial Sequence
  Synthetic oligonucleotide
atgcactgtacgagcgggatcgctagtttacaaca

SEQ ID NO: 625 - DNA, 35 bp, Artificial Sequence
  Synthetic oligonucleotide
gcgcgctaacgtcactgcacatccagggccctatc

SEQ ID NO: 626 - DNA, 38 bp, Artificial Sequence
  Synthetic oligonucleotide
acccgatcgtagggaacgtaccgataacaaaattatga

SEQ ID NO: 627 - DNA, 36 bp, Artificial Sequence
  Synthetic oligonucleotide
actggtaggcatcgacctcaagctttctcaacatca

SEQ ID NO: 628 - DNA, 35 bp, Artificial Sequence
  Synthetic oligonucleotide
acacctaccaggtcacgcgttcgaacttcacttaa

SEQ ID NO: 629 - DNA, 35 bp, Artificial Sequence
  Synthetic oligonucleotide
accgcgcgctagggacgggatgcttcggcctgtta

SEQ ID NO: 630 - DNA, 35 bp, Artificial Sequence
  Synthetic oligonucleotide
taagcaactagggtgctgtcatcgcgatctctttt

SEQ ID NO: 631 - DNA, 35 bp, Artificial Sequence
  Synthetic oligonucleotide
atcccgggactagggcgacgtgatgcatctctcat

SEQ ID NO: 632 - DNA, 35 bp, Artificial Sequence
  Synthetic oligonucleotide
gacaaggtctgcccgcttcccacactacgcttaca

SEQ ID NO: 633 - DNA, 36 bp, Artificial Sequence
  Synthetic oligonucleotide
gcgcccgcttctcataactatggctttattctcaca

SEQ ID NO: 634 - DNA, 36 bp, Artificial Sequence
  Synthetic oligonucleotide
tgctccgggcctaggagattctacgtacgcaatgca

SEQ ID NO: 635 - DNA, 36 bp, Artificial Sequence
  Synthetic oligonucleotide
gccagactcgccccctatttttttggaactcgccta

SEQ ID NO: 636 - DNA, 38 bp, Artificial Sequence
  Synthetic oligonucleotide
gcatccgttaaactcgcctctcaaatcgaatcccatga

SEQ ID NO: 637 - DNA, 35 bp, Artificial Sequence
  Synthetic oligonucleotide
ctcgcagcatgcgaaggctttactcacaactatcg

SEQ ID NO: 638 - DNA, 37 bp, Artificial Sequence
  Synthetic oligonucleotide
ccgtgcgaacgttatgcgaccatgcgctctctcttga

SEQ ID NO: 639 - DNA, 38 bp, Artificial Sequence
  Synthetic oligonucleotide
gtctagccgcttttgttatgatattcttctctttatga

SEQ ID NO: 640 - DNA, 36 bp, Artificial Sequence
  Synthetic oligonucleotide
gcgtgccaacgtaccttccttatctggtgaactaca

SEQ ID NO: 641 - DNA, 35 bp, Artificial Sequence
  Synthetic oligonucleotide
gtgcgcgctaacactcctctcggtcatttgctgga

SEQ ID NO: 642 - DNA, 35 bp, Artificial Sequence
  Synthetic oligonucleotide
agcgcgtgattgcacgtgactgcacttctaatctt

SEQ ID NO: 643 - DNA, 35 bp, Artificial Sequence
  Synthetic oligonucleotide
tccgaacctaggaagccggatggaacatgcgccca

SEQ ID NO: 644 - DNA, 35 bp, Artificial Sequence
  Synthetic oligonucleotide
catcgcaagctttaatacaaaccctatccattgct

SEQ ID NO: 645 - DNA, 36 bp, Artificial Sequence
  Synthetic oligonucleotide
actgcgtgccgagtacaggactacagttaatggcaa

SEQ ID NO: 646 - DNA, 35 bp, Artificial Sequence
  Synthetic oligonucleotide
ccatgcgtgcctatggacgtccccaaacattgtct

SEQ ID NO: 647 - DNA, 35 bp, Artificial Sequence
  Synthetic oligonucleotide
tatcgcgggcaggcgattcgcttgtatttaatccg

SEQ ID NO: 648 - DNA, 36 bp, Artificial Sequence
  Synthetic oligonucleotide
actgcaccgtgtcatggcgagagctcacctaattca

SEQ ID NO: 649 - DNA, 35 bp, Artificial Sequence
  Synthetic oligonucleotide
gacatgcaaaggcccttaattgactccactgtgcc

SEQ ID NO: 650 - DNA, 35 bp, Artificial Sequence
  Synthetic oligonucleotide
catttgcgtgcctaaatgcggcgcgggctggcgac

SEQ ID NO: 651 - DNA, 35 bp, Artificial Sequence
  Synthetic oligonucleotide
gctggccaatgtatctcaaccgtgccgaaattatt

SEQ ID NO: 652 - DNA, 35 bp, Artificial Sequence
  Synthetic oligonucleotide
tgctaggactagccggttttctattactctatttt

SEQ ID NO: 653 - DNA, 36 bp, Artificial Sequence
  Synthetic oligonucleotide
tccggagctaggaactacggcgatctctgcgcctaa

SEQ ID NO: 654 - DNA, 35 bp, Artificial Sequence
  Synthetic oligonucleotide
gcctagtggacaccccgattcgaccttttttgctt

SEQ ID NO: 655 - DNA, 36 bp, Artificial Sequence
  Synthetic oligonucleotide
agtggaccaacggatcgcgtgccaggccgatgggca

SEQ ID NO: 656 - DNA, 36 bp, Artificial Sequence
  Synthetic oligonucleotide
gataaccagtgtcatgcaaacactatacattcctta

SEQ ID NO: 657 - DNA, 35 bp, Artificial Sequence
  Synthetic oligonucleotide
actgcacaacattgattctgacaggttgacaccaa

SEQ ID NO: 658 - DNA, 38 bp, Artificial Sequence
  Synthetic oligonucleotide
agtgcgcaatagtgcgacaagcttctatccatttttga

SEQ ID NO: 659 - DNA, 36 bp, Artificial Sequence
  Synthetic oligonucleotide
gctgacgttcgtagtccatgtacgggctgtcatcaa

SEQ ID NO: 660 - DNA, 36 bp, Artificial Sequence
  Synthetic oligonucleotide
tcgtgcagtatcgcggtcatgtcacactcccgtaca

SEQ ID NO: 661 - DNA, 36 bp, Artificial Sequence
  Synthetic oligonucleotide
agcacgatcgtagtgcgaatcgaacggggtctgcga

SEQ ID NO: 662 - DNA, 36 bp, Artificial Sequence
  Synthetic oligonucleotide
gcgcgctaacgactgtaggaatccaattctgaccga

SEQ ID NO: 663 - DNA, 38 bp, Artificial Sequence
  Synthetic oligonucleotide
agtgactgcgggcactgcgatcgcttttgattatttga

SEQ ID NO: 664 - DNA, 36 bp, Artificial Sequence
  Synthetic oligonucleotide
agccacccatcctcaaccgtgccataatcgcctcta

SEQ ID NO: 665 - DNA, 35 bp, Artificial Sequence
  Synthetic oligonucleotide
gcctctaccgtgcctgtgacccaccagttttttat

SEQ ID NO: 666 - DNA, 35 bp, Artificial Sequence
  Synthetic oligonucleotide
tcgtagtacgcaggtggtcaagcacgatttcttta

SEQ ID NO: 667 - DNA, 38 bp, Artificial Sequence
  Synthetic oligonucleotide
tcagtacgcactagtacattgccaagctttccacatga

SEQ ID NO: 668 - DNA, 35 bp, Artificial Sequence
  Synthetic oligonucleotide
aagcggaactagccaaggcaagggaaatgccctca

SEQ ID NO: 669 - DNA, 35 bp, Artificial Sequence
  Synthetic oligonucleotide
ggaccgaatctaggctgtactgtgcacgcatcgcc

SEQ ID NO: 670 - DNA, 35 bp, Artificial Sequence
  Synthetic oligonucleotide
ttacctacctggtcaggcataacatttagttcctc

SEQ ID NO: 671 - DNA, 38 bp, Artificial Sequence
  Synthetic oligonucleotide
aagaccgcgtgccaggtcaacgtacgcacatgcaatga

SEQ ID NO: 672 - DNA, 38 bp, Artificial Sequence
  Synthetic oligonucleotide
atcgtagtactgtagggcctctgtttcactcaatatga

SEQ ID NO: 673 - DNA, 35 bp, Artificial Sequence
  Synthetic oligonucleotide
aggacaggcgggttttgctgacgttgtctatactg

SEQ ID NO: 674 - DNA, 35 bp, Artificial Sequence
  Synthetic oligonucleotide
tactccactgtgcatccgatcttcttccccaactc

SEQ ID NO: 675 - DNA, 37 bp, Artificial Sequence
  Synthetic oligonucleotide
tctccactgtgcccgtaacttttcttttactgtccga

SEQ ID NO: 676 - DNA, 36 bp, Artificial Sequence
  Synthetic oligonucleotide
ccgggcctaggaggactgcatgacccctttaaccaa

SEQ ID NO: 677 - DNA, 35 bp, Artificial Sequence
  Synthetic oligonucleotide
ccgggcctaggacggttccacagtcagcgaatcct

SEQ ID NO: 678 - DNA, 35 bp, Artificial Sequence
  Synthetic oligonucleotide
aacgcgcgcttgggatgtatgcatcatctagattt

SEQ ID NO: 679 - DNA, 35 bp, Artificial Sequence
  Synthetic oligonucleotide
cacgacgcaccttaccgctttctatttttccgctt

SEQ ID NO: 680 - DNA, 35 bp, Artificial Sequence
  Synthetic oligonucleotide
gcacttggccgctttaactactacgctttgtcctc

SEQ ID NO: 681 - DNA, 37 bp, Artificial Sequence
  Synthetic oligonucleotide
cgtgtacgccagtgccgtgcagtcaggcgatctatga

SEQ ID NO: 682 - DNA, 36 bp, Artificial Sequence
  Synthetic oligonucleotide
cttaggcaatgacgtgcccttatgcgacttcgccca

SEQ ID NO: 683 - DNA, 38 bp, Artificial Sequence
  Synthetic oligonucleotide
gcaccgtttccaccgcgcgtggatcttcccaactttga

SEQ ID NO: 684 - DNA, 35 bp, Artificial Sequence
  Synthetic oligonucleotide
gcggacctagcttacggactgtaattaacgttttt

SEQ ID NO: 685 - DNA, 38 bp, Artificial Sequence
  Synthetic oligonucleotide
atgcgcatcccctctaccgtgcaattttccatccctga

SEQ ID NO: 686 - DNA, 36 bp, Artificial Sequence
  Synthetic oligonucleotide
gacgcgcgccagacagggaactgcacaggcatgcca

SEQ ID NO: 687 - DNA, 35 bp, Artificial Sequence
  Synthetic oligonucleotide
ccgagactaggacccctgtgttcatgcgctatttc

SEQ ID NO: 688 - DNA, 35 bp, Artificial Sequence
  Synthetic oligonucleotide
gctaactgcaggcacagcctaagaaacctcatgta

SEQ ID NO: 689 - DNA, 38 bp, Artificial Sequence
  Synthetic oligonucleotide
tgcagtctagcccgcttaatgtattccttgattcttga

SEQ ID NO: 690 - DNA, 35 bp, Artificial Sequence
  Synthetic oligonucleotide
gcgtgctagcgtactgcatggatactttggtagct

SEQ ID NO: 691 - DNA, 38 bp, Artificial Sequence
  Synthetic oligonucleotide
tcgtagtacagcagaccctccctacctacaattggtga

SEQ ID NO: 692 - DNA, 35 bp, Artificial Sequence
  Synthetic oligonucleotide
gccgctgactgagttctctctactgtgcgtatttt

SEQ ID NO: 693 - DNA, 36 bp, Artificial Sequence
  Synthetic oligonucleotide
gccagcagccctgaactcctctgaagcatcgccgca

SEQ ID NO: 694 - DNA, 35 bp, Artificial Sequence
  Synthetic oligonucleotide
taggtctgcacatgcgctaggcttttcttaccctg

SEQ ID NO: 695 - DNA, 38 bp, Artificial Sequence
  Synthetic oligonucleotide
gcgacgccccacgctttgacctaaacccatcaatatga

SEQ ID NO: 696 - DNA, 38 bp, Artificial Sequence
  Synthetic oligonucleotide
cgctacagacatgcgcatcttgacttatattcaattga

SEQ ID NO: 697 - DNA, 35 bp, Artificial Sequence
  Synthetic oligonucleotide
atgcactactgcgagcgagcacaggtttcctcctt

SEQ ID NO: 698 - DNA, 38 bp, Artificial Sequence
  Synthetic oligonucleotide
aacgcgtgccagagaagaaccgcggtctcgccccatga

SEQ ID NO: 699 - DNA, 35 bp, Artificial Sequence
  Synthetic oligonucleotide
cattgcgaactagctttcttctccttctagctttt

SEQ ID NO: 700 - DNA, 35 bp, Artificial Sequence
  Synthetic oligonucleotide
catgccctagaacattgctttaacactttcgcttt

SEQ ID NO: 701 - DNA, 38 bp, Artificial Sequence
  Synthetic oligonucleotide
tcatgcgatcaatcgctctgcgtgcctagatcgattga

SEQ ID NO: 702 - DNA, 34 bp, Artificial Sequence
  Synthetic oligonucleotide
gcgaccgtggcttcctacctccaagctttccgac

SEQ ID NO: 703 - DNA, 36 bp, Artificial Sequence
  Synthetic oligonucleotide
gcgtgctaacgtactagaccaaagcgagtaacatca

SEQ ID NO: 704 - DNA, 37 bp, Artificial Sequence
  Synthetic oligonucleotide
tcacgcgcgcttgggattacgtacaatcatcaatgga

SEQ ID NO: 705 - DNA, 36 bp, Artificial Sequence
  Synthetic oligonucleotide
gcactacaccctattcccgcgtaggtccccgagcct

SEQ ID NO: 706 - DNA, 36 bp, Artificial Sequence
  Synthetic oligonucleotide
taactccactgtgcgatcattgtttttcttttttga

SEQ ID NO: 707 - DNA, 35 bp, Artificial Sequence
  Synthetic oligonucleotide
atcgtagtactggtactcctgccctatttcgataa

SEQ ID NO: 708 - DNA, 35 bp, Artificial Sequence
  Synthetic oligonucleotide
acactctgcagcctagaactctaccgtgctaattt

SEQ ID NO: 709 - DNA, 35 bp, Artificial Sequence
  Synthetic oligonucleotide
gtgcgcgcgctagcatgcgtaatcatgtcatttaa

SEQ ID NO: 710 - DNA, 35 bp, Artificial Sequence
  Synthetic oligonucleotide
tcaatctcaactgtgcttccctggtttttagtttc

SEQ ID NO: 711 - DNA, 38 bp, Artificial Sequence
  Synthetic oligonucleotide
gtcctgcgtgctaaggaccctaagcttcatgcgtatga

SEQ ID NO: 712 - DNA, 36 bp, Artificial Sequence
  Synthetic oligonucleotide
tcgccgcccaaggatccctctactgtgccactttaa

SEQ ID NO: 713 - DNA, 35 bp, Artificial Sequence
  Synthetic oligonucleotide
gcgtgcctacgtaacgttcatgcggatggaccgat

SEQ ID NO: 714 - DNA, 35 bp, Artificial Sequence
  Synthetic oligonucleotide
cgtgccttggccggaccagtccttttgatcactac

SEQ ID NO: 715 - DNA, 35 bp, Artificial Sequence
  Synthetic oligonucleotide
caggcatgacgatttggcttaacttcccttgctta

SEQ ID NO: 716 - DNA, 35 bp, Artificial Sequence
  Synthetic oligonucleotide
tatgcgtatccaatcgcttttcaattcctatgctt

SEQ ID NO: 717 - DNA, 35 bp, Artificial Sequence
  Synthetic oligonucleotide
ccgcgtgccaggcgtaatgtaggcaggccctttat

SEQ ID NO: 718 - DNA, 35 bp, Artificial Sequence
  Synthetic oligonucleotide
gctaacagcagtcattgaatcctgtacgctccaaa

SEQ ID NO: 719 - DNA, 35 bp, Artificial Sequence
  Synthetic oligonucleotide
atcgcctgcgccaggactggggtgcagatcatgcg

SEQ ID NO: 720 - DNA, 37 bp, Artificial Sequence
  Synthetic oligonucleotide
ctgagcagtcaccattctttatctctactgtgctcga

SEQ ID NO: 721 - DNA, 35 bp, Artificial Sequence
  Synthetic oligonucleotide
acccacatcctgcgtgctaaggacggtggggccgg

SEQ ID NO: 722 - DNA, 36 bp, Artificial Sequence
  Synthetic oligonucleotide
ccggacctaggaatcgactcaggcgtggtagaacaa

SEQ ID NO: 723 - DNA, 35 bp, Artificial Sequence
  Synthetic oligonucleotide
tcatggccactaaactcgccccataaaaccttgtc

SEQ ID NO: 724 - DNA, 35 bp, Artificial Sequence
  Synthetic oligonucleotide
gactctactgtgcccgtttgttgttcttcccgaac

SEQ ID NO: 725 - DNA, 36 bp, Artificial Sequence
  Synthetic oligonucleotide
ggagccgggcctgccacgtagctcggaaaatgcgga

SEQ ID NO: 726 - DNA, 37 bp, Artificial Sequence
  Synthetic oligonucleotide
gatttcactagctctctactgtgcccatttctgttga

SEQ ID NO: 727 - DNA, 35 bp, Artificial Sequence
  Synthetic oligonucleotide
agcggatctagccagtatgcactcatgtcactttt

SEQ ID NO: 728 - DNA, 35 bp, Artificial Sequence
  Synthetic oligonucleotide
actgcacgtgcgcgcttaagttttcgcttctcttt

SEQ ID NO: 729 - DNA, 38 bp, Artificial Sequence
  Synthetic oligonucleotide
gtcgaggggaactcctctgaggctcaacacatatctga

SEQ ID NO: 730 - DNA, 35 bp, Artificial Sequence
  Synthetic oligonucleotide
gcgatccggttaaactacacactctactgtgcgaa

SEQ ID NO: 731 - DNA, 35 bp, Artificial Sequence
  Synthetic oligonucleotide
gctaaccaaggaatgcgctgccttagacagaattg

SEQ ID NO: 732 - DNA, 35 bp, Artificial Sequence
  Synthetic oligonucleotide
tcacctaccagggcgtggtaggtttttctctctac

SEQ ID NO: 733 - DNA, 37 bp, Artificial Sequence
  Synthetic oligonucleotide
cctcgcgtgccagggacctagtgcaatctatccgaga

SEQ ID NO: 734 - DNA, 38 bp, Artificial Sequence
  Synthetic oligonucleotide
ccgagcgaacgtacggaaagtgcgtactttatctttga

SEQ ID NO: 735 - DNA, 36 bp, Artificial Sequence
  Synthetic oligonucleotide
agtacgtgaccactactttccctcctttgtacttga

SEQ ID NO: 736 - DNA, 38 bp, Artificial Sequence
  Synthetic oligonucleotide
tcatgcggttgattggtctactcatgtttcttaattga

SEQ ID NO: 737 - DNA, 36 bp, Artificial Sequence
  Synthetic oligonucleotide
gcacaatcccacgcttcctattataccacgattcta

SEQ ID NO: 738 - DNA, 35 bp, Artificial Sequence
  Synthetic oligonucleotide
acaacccggcgcgccacggggtgatcgacaactgt

SEQ ID NO: 739 - DNA, 35 bp, Artificial Sequence
  Synthetic oligonucleotide
gatcgtccgcgtgcctggcaacgatacccgacaag

SEQ ID NO: 740 - DNA, 35 bp, Artificial Sequence
  Synthetic oligonucleotide
gcgtgtctctctactgtgcgcctcattcttatata

SEQ ID NO: 741 - DNA, 35 bp, Artificial Sequence
  Synthetic oligonucleotide
tcgtagtacacgcagtcgacaaacaagctagtatt

SEQ ID NO: 742 - DNA, 36 bp, Artificial Sequence
  Synthetic oligonucleotide
ttacctaccaacgtaatgcgctacaaccagagagta

SEQ ID NO: 743 - DNA, 35 bp, Artificial Sequence
  Synthetic oligonucleotide
ttagcgaaactagcgtacgacaaggtccaatgtaa

SEQ ID NO: 744 - DNA, 36 bp, Artificial Sequence
  Synthetic oligonucleotide
tgggcggatctagcaaaaacggacgcctcctgcgaa

SEQ ID NO: 745 - DNA, 35 bp, Artificial Sequence
  Synthetic oligonucleotide
aagcacgggacgcatgtcgtggctacctgaattct

SEQ ID NO: 746 - DNA, 38 bp, Artificial Sequence
  Synthetic oligonucleotide
gtgtgcaggcatgacgataagctttctaactcctatga

SEQ ID NO: 747 - DNA, 35 bp, Artificial Sequence
  Synthetic oligonucleotide
tctgcgcgcctagaagtacgcaatcaccacgcgac

SEQ ID NO: 748 - DNA, 38 bp, Artificial Sequence
  Synthetic oligonucleotide
atgtcgctgcaggtgcgtgcaagctttaatctccttga

SEQ ID NO: 749 - DNA, 37 bp, Artificial Sequence
  Synthetic oligonucleotide
tccgggcctaggaacggtcactagggaatgcccctga

SEQ ID NO: 750 - DNA, 36 bp, Artificial Sequence
  Synthetic oligonucleotide
acgtagtgcacatcctagactccactgtgcctctta

SEQ ID NO: 751 - DNA, 35 bp, Artificial Sequence
  Synthetic oligonucleotide
tcatgcataggcttatatgacaccatcgcttcttt

SEQ ID NO: 752 - DNA, 36 bp, Artificial Sequence
  Synthetic oligonucleotide
actgccggctgcaagcttttaggtacacttgattca

SEQ ID NO: 753 - DNA, 38 bp, Artificial Sequence
  Synthetic oligonucleotide
cacgcgccgctttttcgcctatacgctttttattttga

SEQ ID NO: 754 - DNA, 37 bp, Artificial Sequence
  Synthetic oligonucleotide
tctgactgcacgcatgggaccgcttaccactaaccga

SEQ ID NO: 755 - DNA, 36 bp, Artificial Sequence
  Synthetic oligonucleotide
tgcgggactagcataagttccacatgcgaagacaaa

SEQ ID NO: 756 - DNA, 35 bp, Artificial Sequence
  Synthetic oligonucleotide
gcgtgcctacgtacaggcggatatgcgcgtttccc

SEQ ID NO: 757 - DNA, 38 bp, Artificial Sequence
  Synthetic oligonucleotide
gcagtcgcgtatcgattcgctttcttatctggttatga

SEQ ID NO: 758 - DNA, 38 bp, Artificial Sequence
  Synthetic oligonucleotide
cgcaggcatgcaggcttttagtttaattactcctttga

SEQ ID NO: 759 - DNA, 36 bp, Artificial Sequence
  Synthetic oligonucleotide
gacactccagcactaaagctagtgtggtatcactta

SEQ ID NO: 760 - DNA, 38 bp, Artificial Sequence
  Synthetic oligonucleotide
cactgcgcttctagtactacctccactgtgctttttga

SEQ ID NO: 761 - DNA, 35 bp, Artificial Sequence
  Synthetic oligonucleotide
acacatgccgcttaatattgattcgcttttatcat

SEQ ID NO: 762 - DNA, 35 bp, Artificial Sequence
  Synthetic oligonucleotide
gagtagccaaacgcgtgcttggtggcgatcacgta

SEQ ID NO: 763 - DNA, 35 bp, Artificial Sequence
  Synthetic oligonucleotide
tactaaggaaagcggtaaaacgtacactgaaatct

SEQ ID NO: 764 - DNA, 35 bp, Artificial Sequence
  Synthetic oligonucleotide
ggtggtgcgaaaaatgcggtgtgaactcccctgaa

SEQ ID NO: 765 - DNA, 35 bp, Artificial Sequence
  Synthetic oligonucleotide
tatcgcgagccaggagacgtaaaaaggaaatgcgg

SEQ ID NO: 766 - DNA, 35 bp, Artificial Sequence
  Synthetic oligonucleotide
ggccaccgaccactatgcatcgtgtcatgacgtaa

SEQ ID NO: 767 - DNA, 36 bp, Artificial Sequence
  Synthetic oligonucleotide
atccgatctctaccgtgcaacccacccctttgttta

SEQ ID NO: 768 - DNA, 37 bp, Artificial Sequence
  Synthetic oligonucleotide
gcggtcgatcctctcaactgtgcactttttactacga

SEQ ID NO: 769 - DNA, 37 bp, Artificial Sequence
  Synthetic oligonucleotide
attcgtagctcaactctactgtgcattttttgtttga

SEQ ID NO: 770 - DNA, 37 bp, Artificial Sequence
  Synthetic oligonucleotide
gccgctaaactgtctccactgtgctaccttatcttga

SEQ ID NO: 771 - DNA, 35 bp, Artificial Sequence
  Synthetic oligonucleotide
cgcgtgcttgcgtactgtccgcgtaatcacacaca

SEQ ID NO: 772 - DNA, 36 bp, Artificial Sequence
  Synthetic oligonucleotide
tctccactgtgccgtttcctccgttcttactcctaa

SEQ ID NO: 773 - DNA, 35 bp, Artificial Sequence
  Synthetic oligonucleotide
acctgcgtgctaaggaacgtagcattcgtgtgcga

SEQ ID NO: 774 - DNA, 35 bp, Artificial Sequence
  Synthetic oligonucleotide
acacgcgcgcttgggactgaactcagcaatgcacc

SEQ ID NO: 775 - DNA, 35 bp, Artificial Sequence
  Synthetic oligonucleotide
tcacctactaacgtgtgcggggtttttacatcact

SEQ ID NO: 776 - DNA, 36 bp, Artificial Sequence
  Synthetic oligonucleotide
gatagccgcttagccaacacaaccgcttttgattca

SEQ ID NO: 777 - DNA, 35 bp, Artificial Sequence
  Synthetic oligonucleotide
gcggccttgcatcgattcaactcgccctatttcaa

SEQ ID NO: 778 - DNA, 35 bp, Artificial Sequence
  Synthetic oligonucleotide
agcgcatcgtagccgtacagcaatgtaatattctc

SEQ ID NO: 779 - DNA, 35 bp, Artificial Sequence
  Synthetic oligonucleotide
gctaactgcaggccaccacgcttgccctggctacc

SEQ ID NO: 780 - DNA, 35 bp, Artificial Sequence
  Synthetic oligonucleotide
aagcactgtgccgcagatatgcgatttttgtgatt

SEQ ID NO: 781 - DNA, 38 bp, Artificial Sequence
  Synthetic oligonucleotide
tgagccgcgcgcctggccacgacgattcatgtgattga

SEQ ID NO: 782 - DNA, 37 bp, Artificial Sequence
  Synthetic oligonucleotide
catgcgtaagcttatgtttcgattacgttcccattga

SEQ ID NO: 783 - DNA, 35 bp, Artificial Sequence
  Synthetic oligonucleotide
gtggtccgcgcgaaccaccatgggtgcaggcgaat

SEQ ID NO: 784 - DNA, 35 bp, Artificial Sequence
  Synthetic oligonucleotide
tcacctaccagggaaatgtccagccaccccgagct

SEQ ID NO: 785 - DNA, 35 bp, Artificial Sequence
  Synthetic oligonucleotide
gcagggcttgcaggcttttaattgtttcactatcg

SEQ ID NO: 786 - DNA, 36 bp, Artificial Sequence
  Synthetic oligonucleotide
gctaagtgcggtcactgccccaggagcttgatgcta

SEQ ID NO: 787 - DNA, 35 bp, Artificial Sequence
  Synthetic oligonucleotide
gtgcgggactagcacgcagtacagctttctgcgtc

SEQ ID NO: 788 - DNA, 35 bp, Artificial Sequence
  Synthetic oligonucleotide
gcgggactagcgagtttagcctgatactacattga

SEQ ID NO: 789 - DNA, 37 bp, Artificial Sequence
  Synthetic oligonucleotide
gcggacgattcctgttcctttgcttatttctctgaga

SEQ ID NO: 790 - DNA, 35 bp, Artificial Sequence
  Synthetic oligonucleotide
acacggacctagggtcgtactgcaggaagttgttc

SEQ ID NO: 791 - DNA, 37 bp, Artificial Sequence
  Synthetic oligonucleotide
actccactgtgcctctttaacttctttccatatatga

SEQ ID NO: 792 - DNA, 35 bp, Artificial Sequence
  Synthetic oligonucleotide
gcgtgcctacgacgccaggcactagtttagtaaac

SEQ ID NO: 793 - DNA, 38 bp, Artificial Sequence
  Synthetic oligonucleotide
aagcggggagcaacgtactgccatttactattccatga

SEQ ID NO: 794 - DNA, 35 bp, Artificial Sequence
  Synthetic oligonucleotide
tttaacggaacgacctgtggctgcacgtttctcca

SEQ ID NO: 795 - DNA, 35 bp, Artificial Sequence
  Synthetic oligonucleotide
tttgtactgagcaagcgtacataccgaagccccgt

SEQ ID NO: 796 - DNA, 35 bp, Artificial Sequence
  Synthetic oligonucleotide
catgcgcgattagcttgttctaccaccgctttaca

SEQ ID NO: 797 - DNA, 38 bp, Artificial Sequence
  Synthetic oligonucleotide
catgtcgacctctttgtaaactcgccctattttcctga

SEQ ID NO: 798 - DNA, 35 bp, Artificial Sequence
  Synthetic oligonucleotide
cattgcgcgctttcaataacctccgcttataacac

SEQ ID NO: 799 - DNA, 35 bp, Artificial Sequence
  Synthetic oligonucleotide
catctagaggctcattcatattaacacgctttcct

SEQ ID NO: 800 - DNA, 37 bp, Artificial Sequence
  Synthetic oligonucleotide
tcgtagtgctgcaagtccttagtaccttggatcttga

SEQ ID NO: 801 - DNA, 35 bp, Artificial Sequence
  Synthetic oligonucleotide
atgcacggttctgctcaggccatcattttcttcac

SEQ ID NO: 802 - DNA, 35 bp, Artificial Sequence
  Synthetic oligonucleotide
gcgcgcctacgttaatgcacttcgtgacatcttcc

SEQ ID NO: 803 - DNA, 35 bp, Artificial Sequence
  Synthetic oligonucleotide
ccggtcgtagggtgactgcgggcataagctgggtt

SEQ ID NO: 804 - DNA, 35 bp, Artificial Sequence
  Synthetic oligonucleotide
tgcgcaggcccgttgtactcgctcactgctagatt

SEQ ID NO: 805 - DNA, 36 bp, Artificial Sequence
  Synthetic oligonucleotide
aagcacggacaagcatgtatgcgatcacgcccttta

SEQ ID NO: 806 - DNA, 35 bp, Artificial Sequence
  Synthetic oligonucleotide
gactgcgggactagcaacgtactgtggctggcgat

SEQ ID NO: 807 - DNA, 35 bp, Artificial Sequence
  Synthetic oligonucleotide
gcctccgtaacctacccgcgtgcctgggggttacc

SEQ ID NO: 808 - DNA, 35 bp, Artificial Sequence
  Synthetic oligonucleotide
gcagggaatccagcgaccgttcctctaccgtgcct

SEQ ID NO: 809 - DNA, 38 bp, Artificial Sequence
  Synthetic oligonucleotide
catgcggaagctttctctgttgatgatgaaccctttga

SEQ ID NO: 810 - DNA, 35 bp, Artificial Sequence
  Synthetic oligonucleotide
actgcgctaatgcccgcttaacctccatgattgtt

SEQ ID NO: 811 - DNA, 35 bp, Artificial Sequence
  Synthetic oligonucleotide
ggggtcgcgtgccagaccacgactcatgtctgtgc

SEQ ID NO: 812 - DNA, 35 bp, Artificial Sequence
  Synthetic oligonucleotide
atcgtagaactgcagacccgcatggctacctttgt

SEQ ID NO: 813 - DNA, 36 bp, Artificial Sequence
  Synthetic oligonucleotide
attgcggatcgtagctctaactgcgcatgcggtaca

SEQ ID NO: 814 - DNA, 35 bp, Artificial Sequence
  Synthetic oligonucleotide
tacacaccgctttactatcctcaatttcgctttcc

SEQ ID NO: 815 - DNA, 35 bp, Artificial Sequence
  Synthetic oligonucleotide
tgcctctactgtgccgataccggtttctttatatt

SEQ ID NO: 816 - DNA, 36 bp, Artificial Sequence
  Synthetic oligonucleotide
tcccgcgcgctagggtaatgatccagcagacatgta

SEQ ID NO: 817 - DNA, 36 bp, Artificial Sequence
  Synthetic oligonucleotide
tcgtagtactcgcgcttcccgtatcacaattttgaa

SEQ ID NO: 818 - DNA, 37 bp, Artificial Sequence
  Synthetic oligonucleotide
aggtcgcgcgccagggacgtgctgcagaaccacctga

SEQ ID NO: 819 - DNA, 36 bp, Artificial Sequence
  Synthetic oligonucleotide
tctaccgcgcgcttggaggaacgttccggactggca

SEQ ID NO: 820 - DNA, 35 bp, Artificial Sequence
  Synthetic oligonucleotide
gcaaaataataccgctacattctctacaactcgcc

SEQ ID NO: 821 - DNA, 36 bp, Artificial Sequence
  Synthetic oligonucleotide
gcgtggggtgcgcgctaaccacacttgaccagacta

SEQ ID NO: 822 - DNA, 35 bp, Artificial Sequence
  Synthetic oligonucleotide
cccggcgagccacgggctgtacgagcaagtcacac

SEQ ID NO: 823 - DNA, 36 bp, Artificial Sequence
  Synthetic oligonucleotide
gcgaggaccatcccgcgtgcctgggagtcactttaa

SEQ ID NO: 824 - DNA, 38 bp, Artificial Sequence
  Synthetic oligonucleotide
atgcacggatgcggctagcgatctcccctaaacactga

SEQ ID NO: 825 - DNA, 37 bp, Artificial Sequence
  Synthetic oligonucleotide
atgcactgtacgtagagtaatgcggttcattccttga

SEQ ID NO: 826 - DNA, 35 bp, Artificial Sequence
  Synthetic oligonucleotide
gatcgtaacgctgcaaggtcactccgggaaaacca

SEQ ID NO: 827 - DNA, 38 bp, Artificial Sequence
  Synthetic oligonucleotide
cctgcgcgctaggggagatactggttcgtgcgatttga

SEQ ID NO: 828 - DNA, 35 bp, Artificial Sequence
  Synthetic oligonucleotide
acgcgtgctaggacggactgaacggtaaaactaag

SEQ ID NO: 829 - DNA, 38 bp, Artificial Sequence
  Synthetic oligonucleotide
actgcagagtatgcaagcttgaccaccatacgctttga

SEQ ID NO: 830 - DNA, 37 bp, Artificial Sequence
  Synthetic oligonucleotide
catgcgcaggctttctctttagttctcttctggttga

SEQ ID NO: 831 - DNA, 35 bp, Artificial Sequence
  Synthetic oligonucleotide
tcaagcgaatctagcggtacacctcgcaggctcgc

SEQ ID NO: 832 - DNA, 35 bp, Artificial Sequence
  Synthetic oligonucleotide
catgcaagcttcgttcaacatccaacctagctgta

SEQ ID NO: 833 - DNA, 35 bp, Artificial Sequence
  Synthetic oligonucleotide
gcgtgccaacgttgcatcaactattttcatgaatt

SEQ ID NO: 834 - DNA, 38 bp, Artificial Sequence
  Synthetic oligonucleotide
gcgtgctgtgactccaccgtgccttatactttgaatga

SEQ ID NO: 835 - DNA, 36 bp, Artificial Sequence
  Synthetic oligonucleotide
catgcgcaagcttcaacgacacaactaaacctgcta

SEQ ID NO: 836 - DNA, 36 bp, Artificial Sequence
  Synthetic oligonucleotide
ggctgaccacgatgaagtttgcgcaagcttttatta

SEQ ID NO: 837 - DNA, 37 bp, Artificial Sequence
  Synthetic oligonucleotide
aacgcgagcctgtacggtactgcccctatcccaccga

SEQ ID NO: 838 - DNA, 35 bp, Artificial Sequence
  Synthetic oligonucleotide
gcgggcctacgactgcaggacccctgacccattct

SEQ ID NO: 839 - DNA, 36 bp, Artificial Sequence
  Synthetic oligonucleotide
gctaactgcgtgtcatttcggtttcctacatccata

SEQ ID NO: 840 - DNA, 36 bp, Artificial Sequence
  Synthetic oligonucleotide
ccggatctaggagagtactggctgcacatgcgacaa

SEQ ID NO: 841 - DNA, 36 bp, Artificial Sequence
  Synthetic oligonucleotide
tacgcgcgactaacattaatgcggtcttatcatcca

SEQ ID NO: 842 - DNA, 38 bp, Artificial Sequence
  Synthetic oligonucleotide
cgccgcgccagggtactgcaggaagcgctacgacttga

SEQ ID NO: 843 - DNA, 35 bp, Artificial Sequence
  Synthetic oligonucleotide
gcagtcagcaacgcttctttatgtcatacccgctt

SEQ ID NO: 844 - DNA, 35 bp, Artificial Sequence
  Synthetic oligonucleotide
catgcgaaagcttctcatacttgatcacgtttccc

SEQ ID NO: 845 - DNA, 36 bp, Artificial Sequence
  Synthetic oligonucleotide
cacgcggttcgtagcggaatgtactggtcaatccta

SEQ ID NO: 846 - DNA, 36 bp, Artificial Sequence
  Synthetic oligonucleotide
ccggggctaggaacgggggcagtcagagcgaccata

SEQ ID NO: 847 - DNA, 35 bp, Artificial Sequence
  Synthetic oligonucleotide
ccggcagtcttatctctactgtgccttctttaatc

SEQ ID NO: 848 - DNA, 38 bp, Artificial Sequence
  Synthetic oligonucleotide
gagttgcgagcatgcggacgcttttgttttgcttttga

SEQ ID NO: 849 - DNA, 38 bp, Artificial Sequence
  Synthetic oligonucleotide
tacgcaggagggccatgacgctgactatacgcttttga

SEQ ID NO: 850 - DNA, 38 bp, Artificial Sequence
  Synthetic oligonucleotide
ttctgcgcaatttcaaccctctactgtgcccaatttga

SEQ ID NO: 851 - DNA, 35 bp, Artificial Sequence
  Synthetic oligonucleotide
tcataccctcatgatcatgcagtcaccactcttag

SEQ ID NO: 852 - DNA, 38 bp, Artificial Sequence
  Synthetic oligonucleotide
gcggagctagcacggtactgcgcataaactatgattga

SEQ ID NO: 853 - DNA, 35 bp, Artificial Sequence
  Synthetic oligonucleotide
gaccggaactaggtacggctgcagagcgcaaccgc

SEQ ID NO: 854 - DNA, 38 bp, Artificial Sequence
  Synthetic oligonucleotide
tcgtagtcaccgcgggtcatccactattaacaccttga

SEQ ID NO: 855 - DNA, 35 bp, Artificial Sequence
  Synthetic oligonucleotide
acgcgacagctacgagtccccgcggagtgcaacgc

SEQ ID NO: 856 - DNA, 36 bp, Artificial Sequence
  Synthetic oligonucleotide
tcacctactagggaaggccacacggcacgcacatta

SEQ ID NO: 857 - DNA, 37 bp, Artificial Sequence
  Synthetic oligonucleotide
aaccggaactaggtgtgggacctgaaggcatggacga

SEQ ID NO: 858 - DNA, 37 bp, Artificial Sequence
  Synthetic oligonucleotide
gtaaactgcgctcttcttcgccctcccctgtctcgga

SEQ ID NO: 859 - DNA, 35 bp, Artificial Sequence
  Synthetic oligonucleotide
tcccatcgccggacgctccatatctttcggatcct

SEQ ID NO: 860 - DNA, 36 bp, Artificial Sequence
  Synthetic oligonucleotide
tgcctctaccgtgccgtgttgattttctccattcta

SEQ ID NO: 861 - DNA, 38 bp, Artificial Sequence
  Synthetic oligonucleotide
gcgggccgtgactgtttaccactctactgtgcgattga

SEQ ID NO: 862 - DNA, 35 bp, Artificial Sequence
  Synthetic oligonucleotide
gcgatccatgacgaccaatatataccgctttgaca

SEQ ID NO: 863 - DNA, 36 bp, Artificial Sequence
  Synthetic oligonucleotide
tgtactctctactgtgcccttcctgagtgtttatca

SEQ ID NO: 864 - DNA, 36 bp, Artificial Sequence
  Synthetic oligonucleotide
taaggcgaaactagctgaaggtactgcgaattttta

SEQ ID NO: 865 - DNA, 37 bp, Artificial Sequence
  Synthetic oligonucleotide
atgcacggtacggaaggattctgccttcccatcacga

SEQ ID NO: 866 - DNA, 36 bp, Artificial Sequence
  Synthetic oligonucleotide
ggtcgcgtgccaggcacggagatgcggtcctttgca

SEQ ID NO: 867 - DNA, 35 bp, Artificial Sequence
  Synthetic oligonucleotide
aacctgaaggaaccgcatctctaccgtgcctatat

SEQ ID NO: 868 - DNA, 35 bp, Artificial Sequence
  Synthetic oligonucleotide
catgcaggctttccaacccactttaatagctaact

SEQ ID NO: 869 - DNA, 36 bp, Artificial Sequence
  Synthetic oligonucleotide
tcatgccaggctttttctttgaattccgatttaata

SEQ ID NO: 870 - DNA, 36 bp, Artificial Sequence
  Synthetic oligonucleotide
gcgttagatctctaccgtgctcaacctcttctgtaa

SEQ ID NO: 871 - DNA, 36 bp, Artificial Sequence
  Synthetic oligonucleotide
gtgacgccgctatctttacaactctactgtgcttta

SEQ ID NO: 872 - DNA, 36 bp, Artificial Sequence
  Synthetic oligonucleotide
tattgcgaactcctctgagctacggtacgtgtggca

SEQ ID NO: 873 - DNA, 35 bp, Artificial Sequence
  Synthetic oligonucleotide
tctatcaactcgccccaaattacccgccccacata

SEQ ID NO: 874 - DNA, 35 bp, Artificial Sequence
  Synthetic oligonucleotide
catgtctaggtctttcgtaatcctctaccgtgcca

SEQ ID NO: 875 - DNA, 36 bp, Artificial Sequence
  Synthetic oligonucleotide
ctgcggtcagtgcccatccgctcccaactagcctta

SEQ ID NO: 876 - DNA, 38 bp, Artificial Sequence
  Synthetic oligonucleotide
ccactccaccgtgcccttctataggttttctcaactga

SEQ ID NO: 877 - DNA, 35 bp, Artificial Sequence
  Synthetic oligonucleotide
gccttcccacgtcgagtcagttcgacgtccccgtt

SEQ ID NO: 878 - DNA, 38 bp, Artificial Sequence
  Synthetic oligonucleotide
tcatccttttactcgaccgtgccccccttagttcctga

SEQ ID NO: 879 - DNA, 36 bp, Artificial Sequence
  Synthetic oligonucleotide
taaaggccacgcatcccccgttaaaacatcattaaa

SEQ ID NO: 880 - DNA, 36 bp, Artificial Sequence
  Synthetic oligonucleotide
ttcttctccactgtgccccaactcaatttttgatta

SEQ ID NO: 881 - DNA, 36 bp, Artificial Sequence
  Synthetic oligonucleotide
tctccaccgtgccatcgaaaatttactctctgctca

SEQ ID NO: 882 - DNA, 38 bp, Artificial Sequence
  Synthetic oligonucleotide
taacctactaaggcatgtcgactctatcatatgcttga

SEQ ID NO: 883 - DNA, 36 bp, Artificial Sequence
  Synthetic oligonucleotide
aaaggcatgacatatatcctctaccgtgcccgccta

SEQ ID NO: 884 - DNA, 36 bp, Artificial Sequence
  Synthetic oligonucleotide
catgccagatttcgcactagttacctccttagctta

SEQ ID NO: 885 - DNA, 38 bp, Artificial Sequence
  Synthetic oligonucleotide
catgccggagcgatttattcaatatcttctatgagtga

SEQ ID NO: 886 - DNA, 35 bp, Artificial Sequence
  Synthetic oligonucleotide
atcgtagtacaaaagggggttatctcttggtttcg

SEQ ID NO: 887 - DNA, 35 bp, Artificial Sequence
  Synthetic oligonucleotide
tagacatatcgttctggactttttctccactgtgc

SEQ ID NO: 888 - DNA, 37 bp, Artificial Sequence
  Synthetic oligonucleotide
atcgtagtactgtggtccgccactacccgaactatga

SEQ ID NO: 889 - DNA, 37 bp, Artificial Sequence
  Synthetic oligonucleotide
gaagagccccgcctgcttccttatccagatcatgcga

SEQ ID NO: 890 - DNA, 35 bp, Artificial Sequence
  Synthetic oligonucleotide
gcgcgatacgacatctccttagcttttgttttgct

SEQ ID NO: 891 - DNA, 35 bp, Artificial Sequence
  Synthetic oligonucleotide
gacgtcatggccaccctagcttcatttcttgcttt

SEQ ID NO: 892 - DNA, 38 bp, Artificial Sequence
  Synthetic oligonucleotide
ccggtcgtaggactaccgccaggcatattattgtttga

SEQ ID NO: 893 - DNA, 36 bp, Artificial Sequence
  Synthetic oligonucleotide
tgtggtagtacgcagtcagtcgctgtatcccgctaa

SEQ ID NO: 894 - DNA, 38 bp, Artificial Sequence
  Synthetic oligonucleotide
tatgcgcccctggtctatattcggaaaaccctacctga

SEQ ID NO: 895 - DNA, 35 bp, Artificial Sequence
  Synthetic oligonucleotide
ttaggtatcatgcggccacctggtctaatattttt

SEQ ID NO: 896 - DNA, 35 bp, Artificial Sequence
  Synthetic oligonucleotide
tcgtagtactcagggccccaccaaatttcttaaat

SEQ ID NO: 897 - DNA, 35 bp, Artificial Sequence
  Synthetic oligonucleotide
accgcgcgcctggtatcctgctatgtctagtccct

SEQ ID NO: 898 - DNA, 35 bp, Artificial Sequence
  Synthetic oligonucleotide
gatcgtagcgtacgtaggaaatccccgaaacaacg

SEQ ID NO: 899 - DNA, 37 bp, Artificial Sequence
  Synthetic oligonucleotide
cgtgccatggctttaaccgtatcttcgctttttctga

SEQ ID NO: 900 - DNA, 36 bp, Artificial Sequence
  Synthetic oligonucleotide
gcgatcgtagcacggtaaactggcccccttgcaata

SEQ ID NO: 901 - DNA, 36 bp, Artificial Sequence
  Synthetic oligonucleotide
acgcactgtataaagtctacgcgcccttcaaccata

SEQ ID NO: 902 - DNA, 38 bp, Artificial Sequence
  Synthetic oligonucleotide
cttacgcgtgcttggaacgatgtattgcggccaattga

SEQ ID NO: 903 - DNA, 36 bp, Artificial Sequence
  Synthetic oligonucleotide
tcgtaggactgcaaaccacacgccttgttcgaaaaa

SEQ ID NO: 904 - DNA, 35 bp, Artificial Sequence
  Synthetic oligonucleotide
ccgggtctaggacggctctgttgtctcctccctgt

SEQ ID NO: 905 - DNA, 35 bp, Artificial Sequence
  Synthetic oligonucleotide
atcgtagcactgcagggcgcctagtttacaatggg

SEQ ID NO: 906 - DNA, 35 bp, Artificial Sequence
  Synthetic oligonucleotide
gacgtcatcgtgccttcttggctgaccgtacagga

SEQ ID NO: 907 - DNA, 38 bp, Artificial Sequence
  Synthetic oligonucleotide
ttcatccgcgcgaatgaaaccgatctacatccctatga

SEQ ID NO: 908 - DNA, 35 bp, Artificial Sequence
  Synthetic oligonucleotide
atcgtagtaccataccccgcatgccgccaaaattt

SEQ ID NO: 909 - DNA, 37 bp, Artificial Sequence
  Synthetic oligonucleotide
aaacccgcgagcaggcattgaactcccctgaatacga

SEQ ID NO: 910 - DNA, 37 bp, Artificial Sequence
  Synthetic oligonucleotide
gcaatgacgtgcgttcgaccgattatctctactatga

SEQ ID NO: 911 - DNA, 36 bp, Artificial Sequence
  Synthetic oligonucleotide
aagcactgtacggaagtaggcccgcccccaaattaa

SEQ ID NO: 912 - DNA, 35 bp, Artificial Sequence
  Synthetic oligonucleotide
tcgtagtatctggaggtcgtgcgttgcactattac

SEQ ID NO: 913 - DNA, 36 bp, Artificial Sequence
  Synthetic oligonucleotide
gatcgtatacgtacgctaggtctctttcgcttatca

SEQ ID NO: 914 - DNA, 36 bp, Artificial Sequence
  Synthetic oligonucleotide
tgggcaaccggaactagtacagcccacgtacgttga

SEQ ID NO: 915 - DNA, 36 bp, Artificial Sequence
  Synthetic oligonucleotide
tcgcaaactcagcttcctctctaccgtgcatgttaa

SEQ ID NO: 916 - DNA, 38 bp, Artificial Sequence
  Synthetic oligonucleotide
gcgcgctaacaccctgcggtacaccaggaactccttga

SEQ ID NO: 917 - DNA, 35 bp, Artificial Sequence
  Synthetic oligonucleotide
ccggtcactgctggagtgcgaaagctttctcttgt

SEQ ID NO: 918 - DNA, 36 bp, Artificial Sequence
  Synthetic oligonucleotide
gcagaaggaaatgcgcgctaattgacaacgctcgaa

SEQ ID NO: 919 - DNA, 38 bp, Artificial Sequence
  Synthetic oligonucleotide
accgcgcgcctgggaccgtaatggatcctacataatga

SEQ ID NO: 920 - DNA, 36 bp, Artificial Sequence
  Synthetic oligonucleotide
gcgatcgtagctaagggatctactagggaatgccca

SEQ ID NO: 921 - DNA, 35 bp, Artificial Sequence
  Synthetic oligonucleotide
ttacctaccagggatgcggccccgaagccattctt

SEQ ID NO: 922 - DNA, 38 bp, Artificial Sequence
  Synthetic oligonucleotide
taggcaactaatgcagagacgcgacccacgacatttga

SEQ ID NO: 923 - DNA, 35 bp, Artificial Sequence
  Synthetic oligonucleotide
ctcctagcaggcgggccctgacaggcggtcgtagc

SEQ ID NO: 924 - DNA, 35 bp, Artificial Sequence
  Synthetic oligonucleotide
tcacctaccacggtcatctttacttgagacaacaa

SEQ ID NO: 925 - DNA, 35 bp, Artificial Sequence
  Synthetic oligonucleotide
taagcaactcctgccgtgccattaaagcttttata

SEQ ID NO: 926 - DNA, 36 bp, Artificial Sequence
  Synthetic oligonucleotide
taccgctgccatgaatcatctctgttaaactagcca

SEQ ID NO: 927 - DNA, 37 bp, Artificial Sequence
  Synthetic oligonucleotide
gagtacgcgacgccttggtctactactcttccctgga

SEQ ID NO: 928 - DNA, 35 bp, Artificial Sequence
  Synthetic oligonucleotide
gcggtcgtagcaacactgcatcctcatgatactta

SEQ ID NO: 929 - DNA, 35 bp, Artificial Sequence
  Synthetic oligonucleotide
tccgacggggcatcgtgtcaggcgcatgaaatttt

SEQ ID NO: 930 - DNA, 35 bp, Artificial Sequence
  Synthetic oligonucleotide
atcgtagtagtgccgcgctagcctgacgcaaaatt

SEQ ID NO: 931 - DNA, 38 bp, Artificial Sequence
  Synthetic oligonucleotide
aggcgtgcatgacgatttaattaaccaccgaaccatga

SEQ ID NO: 932 - DNA, 36 bp, Artificial Sequence
  Synthetic oligonucleotide
catcatacgaccgcgtgattggtgagttgtaacgga

SEQ ID NO: 933 - DNA, 35 bp, Artificial Sequence
  Synthetic oligonucleotide
catgcaagcttggattttctcacgtttcattgtta

SEQ ID NO: 934 - DNA, 35 bp, Artificial Sequence
  Synthetic oligonucleotide
gcgcataggctttttatatttattctctatgcttt

SEQ ID NO: 935 - DNA, 35 bp, Artificial Sequence
  Synthetic oligonucleotide
gcccgattccagaaaccacgcttttaccatttcct

SEQ ID NO: 936 - DNA, 37 bp, Artificial Sequence
  Synthetic oligonucleotide
gctagcattggcttttgtttatttgcttctatcttga

SEQ ID NO: 937 - DNA, 35 bp, Artificial Sequence
  Synthetic oligonucleotide
gcgctactagccgatatatttccgttccactcttt

SEQ ID NO: 938 - DNA, 36 bp, Artificial Sequence
  Synthetic oligonucleotide
gactaaatacctcactatctccactgtgccgttaaa

SEQ ID NO: 939 - DNA, 35 bp, Artificial Sequence
  Synthetic oligonucleotide
gcaaattctgttcgatccacactattaactcgctt

SEQ ID NO: 940 - DNA, 37 bp, Artificial Sequence
  Synthetic oligonucleotide
gaatcatccggccctaaactccactgtgccctcttga

SEQ ID NO: 941 - DNA, 35 bp, Artificial Sequence
  Synthetic oligonucleotide
tgctaggtgatgaattaatttggtctctttttggt

SEQ ID NO: 942 - DNA, 35 bp, Artificial Sequence
  Synthetic oligonucleotide
gcctacaggatttttgattgatcgatttcgcttct

SEQ ID NO: 943 - DNA, 36 bp, Artificial Sequence
  Synthetic oligonucleotide
catgcaattcttcgcttcctattccttaagcttgta

SEQ ID NO: 944 - DNA, 36 bp, Artificial Sequence
  Synthetic oligonucleotide
gctaactgcttggcgtgcgagctgaaccaacgctta

SEQ ID NO: 945 - DNA, 36 bp, Artificial Sequence
  Synthetic oligonucleotide
gccgaaaacatcgctgttcgtcttatcaactcgccc

SEQ ID NO: 946 - DNA, 36 bp, Artificial Sequence
  Synthetic oligonucleotide
atgcctgtccaaaaactctaccgtgccgtgttacta

SEQ ID NO: 947 - DNA, 37 bp, Artificial Sequence
  Synthetic oligonucleotide
catgcgtcgattcactatcttcgctttcaattgctga

SEQ ID NO: 948 - DNA, 35 bp, Artificial Sequence
  Synthetic oligonucleotide
gtcaaatgtcaatgggcaccacgcactgttcgcgc

SEQ ID NO: 949 - DNA, 36 bp, Artificial Sequence
  Synthetic oligonucleotide
gcgacacgattggtcaattcctcgctttcctctcta

SEQ ID NO: 950 - DNA, 36 bp, Artificial Sequence
  Synthetic oligonucleotide
catagggacggaacgggcacggtagctcctaacgta

SEQ ID NO: 951 - DNA, 36 bp, Artificial Sequence
  Synthetic oligonucleotide
taggcaactactaggtgatgcgtcaattacctctta

SEQ ID NO: 952 - DNA, 38 bp, Artificial Sequence
  Synthetic oligonucleotide
tcacctaccacaagatcgtgcccctgaatcacttgtga

SEQ ID NO: 953 - DNA, 36 bp, Artificial Sequence
  Synthetic oligonucleotide
agtcaggcatggtagacgcttctacttcgctttcta

SEQ ID NO: 954 - DNA, 37 bp, Artificial Sequence
  Synthetic oligonucleotide
taacctaccaagtacatgacctttcacttgatcttga

SEQ ID NO: 955 - DNA, 38 bp, Artificial Sequence
  Synthetic oligonucleotide
tatgccagcttctcatatatcccgctttctatcaatga

SEQ ID NO: 956 - DNA, 35 bp, Artificial Sequence
  Synthetic oligonucleotide
gaagccgcgcgccaagcaaagggtactgcccctct

SEQ ID NO: 957 - DNA, 36 bp, Artificial Sequence
  Synthetic oligonucleotide
atgcacggtgcggccggtcatgcaagacacttcgta

SEQ ID NO: 958 - DNA, 35 bp, Artificial Sequence
  Synthetic oligonucleotide
ttcatttatctccaccgtgcactccatggatctta

SEQ ID NO: 959 - DNA, 36 bp, Artificial Sequence
  Synthetic oligonucleotide
gcaggcttcgaatcctccactgtgctaatacatgaa

SEQ ID NO: 960 - DNA, 35 bp, Artificial Sequence
  Synthetic oligonucleotide
atgcactgttgtgatcggcctgagcaggcgcccaa

SEQ ID NO: 961 - DNA, 38 bp, Artificial Sequence
  Synthetic oligonucleotide
aacccctcgccgcgtgcctggcgacggagtagtaatga

SEQ ID NO: 962 - DNA, 37 bp, Artificial Sequence
  Synthetic oligonucleotide
actccaccgtgccctttaatctcatgtgccacactga

SEQ ID NO: 963 - DNA, 35 bp, Artificial Sequence
  Synthetic oligonucleotide
gcgattatattaatttctctaccgtgcgatcccaa

SEQ ID NO: 964 - DNA, 35 bp, Artificial Sequence
  Synthetic oligonucleotide
atgcatcagcgcgcttattaatcaatcgcttttgt

SEQ ID NO: 965 - DNA, 34 bp, Artificial Sequence
  Synthetic oligonucleotide
gcgtgccagcgtactcgcatctcacagaacccgt

SEQ ID NO: 966 - DNA, 35 bp, Artificial Sequence
  Synthetic oligonucleotide
caaccactattcgcgtgccagggtggggaaacgtt

SEQ ID NO: 967 - DNA, 36 bp, Artificial Sequence
  Synthetic oligonucleotide
tatgcaaccgggactgagagtcctagcgctttttta

SEQ ID NO: 968 - DNA, 36 bp, Artificial Sequence
  Synthetic oligonucleotide
gcccgctttgtcaccggaattaattaactcgcctca

SEQ ID NO: 969 - DNA, 35 bp, Artificial Sequence
  Synthetic oligonucleotide
tcacctactagattcgtgccagaatttcaaatttc

SEQ ID NO: 970 - DNA, 25 bp, Artificial Sequence
  Synthetic oligonucleotide
cgaaagccatgacctccgatcactc

SEQ ID NO: 971 - DNA, 35 bp, Artificial Sequence
  Synthetic oligonucleotide
cctcaagacctaagcgacagcgtgaccttgtttca

SEQ ID NO: 972 - DNA, 68 bp, Artificial Sequence
  Synthetic oligonucleotide
caagtttccaggtagtttgcgtgttttacgtaccctcaagacctaagcgacagcgtgaccttgtttca

SEQ ID NO: 973 - DNA, 66 bp, Artificial Sequence
  Synthetic oligonucleotide
cagggtaggtatcgtgagtgttttacgtactcatcctcttcttttcttggtgttgagaagatgctc

SEQ ID NO: 974 - DNA, 69 bp, Artificial Sequence
  Synthetic oligonucleotide
gaaagtacaggaaaatgcctgctgttttacgtaccacaattctgcgggttagcaggaaggttagggaac

SEQ ID NO: 975 - DNA, 63 bp, Artificial Sequence
  Synthetic oligonucleotide
gagacagagtagggccaatgcgataatgctgttgagattattgagcttcatcatgaccagaag

SEQ ID NO: 976 - DNA, 66 bp, Artificial Sequence
  Synthetic oligonucleotide
gagacagagaaaaagggatagttcgttcggtcaaagacgcctatcttccagtttgatcgggaaact

SEQ ID NO: 977 - DNA, 58 bp, Artificial Sequence
  Synthetic oligonucleotide
gacgcgtggtgggttttacgtaccgaacctaactcctcgctacattcctattgttttc

SEQ ID NO: 978 - DNA, 57 bp, Artificial Sequence
  Synthetic oligonucleotide
gcgcaggaccggttttacgtacccaatttggttttactcccctcgattatgcggagt

SEQ ID NO: 979 - DNA, 60 bp, Artificial Sequence
  Synthetic oligonucleotide
gagacagaaagtcgcatgggcagtactttcgggttatatctatcatttacttgacaccct

SEQ ID NO: 980 - DNA, 67 bp, Artificial Sequence
  Synthetic oligonucleotide
agtggagtttaattggccttcagttacgtactcaacagccactttttttccaaattttgcaagagcc

SEQ ID NO: 981 - DNA, 66 bp, Artificial Sequence
  Synthetic oligonucleotide
gaacgattcgtagggtatgcatgtacgtactcaccgtgtggacggcaactcagagataacgcatat

SEQ ID NO: 982 - DNA, 60 bp, Artificial Sequence
  Synthetic oligonucleotide
agtatcaacgccggcatgtacgtaccctggagtttatgtattgccaacgagtttgtcttt

SEQ ID NO: 983 - DNA, 60 bp, Artificial Sequence
  Synthetic oligonucleotide
taaagggcgtggcatgtctacgtaccagataaggttgttattgtggaggatgttactaca

SEQ ID NO: 984 - DNA, 66 bp, Artificial Sequence
  Synthetic oligonucleotide
gagacagaacattggcacagtagagataggtcttccttcctgtgttccagctacaaacttagaaac

SEQ ID NO: 985 - DNA, 63 bp, Artificial Sequence
  Synthetic oligonucleotide
taatggcagccttacgtacctacgtactcataaaattggttttgcctttcagcaattcaactt

SEQ ID NO: 986 - DNA, 55 bp, Artificial Sequence
  Synthetic oligonucleotide
cgggcgcactgactacgtacctggtcaagacttgcatgaggacccgcaaattcct

SEQ ID NO: 987 - DNA, 57 bp, Artificial Sequence
  Synthetic oligonucleotide
gagacaggaagggcaccgtagactttcgttgggacgcttgaagcgcaagtagaaaac

SEQ ID NO: 988 - DNA, 58 bp, Artificial Sequence
  Synthetic oligonucleotide
ccatcgcgactgcactacgtactccagcagacctgcaatatcaaagttataagcgcgt

SEQ ID NO: 989 - DNA, 63 bp, Artificial Sequence
  Synthetic oligonucleotide
gagacagtcaaggcacagtggagtaatgcctgccaatgcactcgatcttgtcatttttttgcg

SEQ ID NO: 990 - DNA, 67 bp, Artificial Sequence
  Synthetic oligonucleotide
ggtagagaatacaagggtctgcaactacgtaccaaactggagagagaagtgaagacgatttaaccca

SEQ ID NO: 991 - DNA, 57 bp, Artificial Sequence
  Synthetic oligonucleotide
cggttcgcatggccatacgtaccgattgctgcattccgctcaacgcttgaggaagta

SEQ ID NO: 992 - DNA, 60 bp, Artificial Sequence
  Synthetic oligonucleotide
gaaggggatgaccgcaatacgtactctgaggctgttaaagctgtagcaactcttccacga

SEQ ID NO: 993 - DNA, 58 bp, Artificial Sequence
  Synthetic oligonucleotide
ccagtgacctgcagtgacgtactctaggacgcaaatcacttgaagaagtgaaagcgag

SEQ ID NO: 994 - DNA, 69 bp, Artificial Sequence
  Synthetic oligonucleotide
tggagttcaacaatatcagttagcagtgacgtacccacgcgatgacgttcgtcaagagtcgcataatct

SEQ ID NO: 995 - DNA, 58 bp, Artificial Sequence
  Synthetic oligonucleotide
cctgccacagtacctgacgtactcatttggaatgatgtgtactgggaataagacgacg

SEQ ID NO: 996 - DNA, 58 bp, Artificial Sequence
  Synthetic oligonucleotide
ctggactgctgacctgacgtactcacaagaatccctgctagctgaaggagggtcaaac

SEQ ID NO: 997 - DNA, 66 bp, Artificial Sequence
  Synthetic oligonucleotide
gaaaaatgacagacagcggttactgacgtaccttgacgtagattgctatcaggttacgatgactgc

SEQ ID NO: 998 - DNA, 64 bp, Artificial Sequence
  Synthetic oligonucleotide
aggttcgacgactacagttactgacgtaccttacagatcgtgtgctcatgacttccacagacgt

SEQ ID NO: 999 - DNA, 61 bp, Artificial Sequence
  Synthetic oligonucleotide
cgcatgagcttccttactgacgtactcttggaggagttgatagtggtaaaacaacattagc

SEQ ID NO: 1000 - DNA, 65 bp, Artificial Sequence
  Synthetic oligonucleotide
gagacagtcaagtatttacaagtggcgcagcctacgtatatatccaagtggttatgtccgacggc

SEQ ID NO: 1001 - DNA, 75 bp, Artificial Sequence
  Synthetic oligonucleotide
gagacagtaaaataagagagaacgtactagcttcgcattacagcaagaaggagtatggaacttatagcaagagag

SEQ ID NO: 1002 - DNA, 66 bp, Artificial Sequence
  Synthetic oligonucleotide
ggaaagaatcgcgatgtttgtactgacgtaccacccctccaaacgcattcttattggcaaatggaa

SEQ ID NO: 1003 - DNA, 57 bp, Artificial Sequence
  Synthetic oligonucleotide
ggcgtttacgggcatgacgtaccccgaagcaatactgtcgtcactctgtatgtccgt

SEQ ID NO: 1004 - DNA, 57 bp, Artificial Sequence
  Synthetic oligonucleotide
gtcgaaaggcggcatgacgtacccgggaatcggcatttcgcattcttaggatctaaa

SEQ ID NO: 1005 - DNA, 70 bp, Artificial Sequence
  Synthetic oligonucleotide
gagacaggagtgaatgagtttgagtatggaatgacccgatcttcataacggacaaactgaacgggccatt

SEQ ID NO: 1006 - DNA, 64 bp, Artificial Sequence
  Synthetic oligonucleotide
gttaatggaagcttgtcgcatgacgtactcgctatgcagacgagctggcagaggagagaaatca

SEQ ID NO: 1007 - DNA, 63 bp, Artificial Sequence
  Synthetic oligonucleotide
atgataagggtagctcgcatgacgtactcattcgcaaccatgtgaagtaatgtgagcgtactt

SEQ ID NO: 1008 - DNA, 56 bp, Artificial Sequence
  Synthetic oligonucleotide
ggcgcaatcgcatgacgtactcaccagttagcgtggcgtataccatgttgttaaca

SEQ ID NO: 1009 - DNA, 67 bp, Artificial Sequence
  Synthetic oligonucleotide
gagacagtgataatttagggctacggagtacgcctgaatcaatagaacaatatcagttatggcggtg

SEQ ID NO: 1010 - DNA, 67 bp, Artificial Sequence
  Synthetic oligonucleotide
gagacagatgattagggtagtagagaacgcaccggttgttaatatgacaggccgctaaagacgttct

SEQ ID NO: 1011 - DNA, 68 bp, Artificial Sequence
  Synthetic oligonucleotide
gagacagtttgaatcatgagtttgtgaaagcgtccgtctcagatgagtgggttaatcaatcaagtatg

SEQ ID NO: 1012 - DNA, 64 bp, Artificial Sequence
  Synthetic oligonucleotide
gagagaataggacgtacgcatgacgtactctgacacattagtaacgtcggcaagcacttagtcg

SEQ ID NO: 1013 - DNA, 58 bp, Artificial Sequence
  Synthetic oligonucleotide
tgggtgtgcgtacatgacgtactcgtgaaccagattatgtatggacgcgcaatagata

SEQ ID NO: 1014 - DNA, 58 bp, Artificial Sequence
  Synthetic oligonucleotide
ggtttccgcattgcaggacgtaccatacgaaatttgagcaagcaattgaaggcttaga

SEQ ID NO: 1015 - DNA, 53 bp, Artificial Sequence
  Synthetic oligonucleotide
ccctggctcgcgacgtacctatcagctaatagggtcggctcaacagtgtatcc

SEQ ID NO: 1016 - DNA, 62 bp, Artificial Sequence
  Synthetic oligonucleotide
cagtagagaacaagtcgcacgacgtacctatcaattcgtgaccccgatcatccagtccagaa

SEQ ID NO: 1017 - DNA, 61 bp, Artificial Sequence
  Synthetic oligonucleotide
gagacaggcaaagatgaaagcgcatgcttgagctctaggcccaaaacgaccttaatggtca

SEQ ID NO: 1018 - DNA, 52 bp, Artificial Sequence
  Synthetic oligonucleotide
tgcccgccctcacgtacctagcccagatcctacgagatgagctacgtaacta

SEQ ID NO: 1019 - DNA, 55 bp, Artificial Sequence
  Synthetic oligonucleotide
gttggaccgccctcacgtaccaaatgcactctatatggagggagagtagctggat

SEQ ID NO: 1020 - DNA, 57 bp, Artificial Sequence
  Synthetic oligonucleotide
actcctgtacgccctcacgtaccctggtctaggtatctaattcgtgggtcgggtact

SEQ ID NO: 1021 - DNA, 63 bp, Artificial Sequence
  Synthetic oligonucleotide
gccattaacttcagtagccctcacgtaccattagctcggatgctatcagcttgcgcctattat

SEQ ID NO: 1022 - DNA, 65 bp, Artificial Sequence
  Synthetic oligonucleotide
gagacaggataaaggtaagaaaagcggctgcacgatctgtattttgcacctttcgctatgctgag

SEQ ID NO: 1023 - DNA, 64 bp, Artificial Sequence
  Synthetic oligonucleotide
gagacagtcaggaaggaaaatgtacgcacctgtgtccgtctatacgcatactggtccacatata

SEQ ID NO: 1024 - DNA, 62 bp, Artificial Sequence
  Synthetic oligonucleotide
gagacagagggacaaggaggaaattggcatgttggagttaacggagacccgccatcgtttac

SEQ ID NO: 1025 - DNA, 53 bp, Artificial Sequence
  Synthetic oligonucleotide
ggacggcccctcacgtaccgctcattttgaacatacgattgcgattacggaaa

SEQ ID NO: 1026 - DNA, 55 bp, Artificial Sequence
  Synthetic oligonucleotide
atgaccgcccctcacgtactcctatgcatcatgtgcctcactaggacatcatgct

SEQ ID NO: 1027 - DNA, 66 bp, Artificial Sequence
  Synthetic oligonucleotide
cacagtagaggaatatgcgctatcacgtactcctaaattgggaaaaaaggttttagctattgatgg

SEQ ID NO: 1028 - DNA, 59 bp, Artificial Sequence
  Synthetic oligonucleotide
gagacagtcattgggcacggtagacttcagttaaaggctatcttgctccgctcgttctc

SEQ ID NO: 1029 - DNA, 61 bp, Artificial Sequence
  Synthetic oligonucleotide
gcacggtagagagtagttgcacgtaccttaaagctatccacgaatgtcaaaaatgtggttt

SEQ ID NO: 1030 - DNA, 73 bp, Artificial Sequence
  Synthetic oligonucleotide
gagacagtatgagataagcacagtagagattgacatgtcccgaatgtataatgctgacgttcttgcttttggc

SEQ ID NO: 1031 - DNA, 58 bp, Artificial Sequence
  Synthetic oligonucleotide
gagacagtaggggcacggtagagcctattgaagcaatcctctccccaatacttaaaaa

SEQ ID NO: 1032 - DNA, 54 bp, Artificial Sequence
  Synthetic oligonucleotide
gggggtgtcctgcacgtacctacggttaccgtctttataagtgaacaaaaccgg

SEQ ID NO: 1033 - DNA, 63 bp, Artificial Sequence
  Synthetic oligonucleotide
gtagagtatccacgcaaactgcacgtacctctgtgaactgtcatcggtccgatcaattagtct

SEQ ID NO: 1034 - DNA, 63 bp, Artificial Sequence
  Synthetic oligonucleotide
gcacggtagagttcatgtatgcacgtacctcccctttcccaagtaaatgtacgggaattatcg

SEQ ID NO: 1035 - DNA, 67 bp, Artificial Sequence
  Synthetic oligonucleotide
gagacagggcacggtagagtaaaataatgtgacgctttattatgtgttcgtctaactctgtttctgt

SEQ ID NO: 1036 - DNA, 57 bp, Artificial Sequence
  Synthetic oligonucleotide
aaagtgcgcctgatgcacgtacccgagtgcatgagctgtctttcacatgatacatcg

SEQ ID NO: 1037 - DNA, 61 bp, Artificial Sequence
  Synthetic oligonucleotide
ctcgagaacgatactgtggcacgtacctatttctgttcacggatgaaggcctatatcaatg

SEQ ID NO: 1038 - DNA, 55 bp, Artificial Sequence
  Synthetic oligonucleotide
ccctctcgcatggcacgtacccatccactttcatggaaacaataagagcagggaa

SEQ ID NO: 1039 - DNA, 62 bp, Artificial Sequence
  Synthetic oligonucleotide
gagacagtcacgtcatttcagatggcacacaaactcactactaccaacaacctcaccaaaaa

SEQ ID NO: 1040 - DNA, 78 bp, Artificial Sequence
  Synthetic oligonucleotide
gagacagtcaaccttaatataagcacagtagagttacaagttcctcatgtcctctgttaatccagcctgaatatgcca

SEQ ID NO: 1041 - DNA, 62 bp, Artificial Sequence
  Synthetic oligonucleotide
gcacagtagagtattggtcgcacgtaccagaaatgtcactcccatggtggctgatatagaaa

SEQ ID NO: 1042 - DNA, 58 bp, Artificial Sequence
  Synthetic oligonucleotide
gagacagaggagtgagcacggttcatgtcgaaccttggataggagcgaccgattacgt

SEQ ID NO: 1043 - DNA, 62 bp, Artificial Sequence
  Synthetic oligonucleotide
ggttacatgggctttatcgcacgtactctcaggttgttacttgaagggttcaacacgagctc

SEQ ID NO: 1044 - DNA, 60 bp, Artificial Sequence
  Synthetic oligonucleotide
ggtagagacaacttgcgcacgtactcagaagatcaaaaaacgatccctgtccatcaatac

SEQ ID NO: 1045 - DNA, 65 bp, Artificial Sequence
  Synthetic oligonucleotide
gagacagaataaagcacggtggagacaatgcttaggctaccaaatgaatttaaagccagctgaaa

SEQ ID NO: 1046 - DNA, 65 bp, Artificial Sequence
  Synthetic oligonucleotide
gagacagtaggaaataggcacggtagagttccaatgcttgcagtatgtatcctgatcgtgcgtgc

SEQ ID NO: 1047 - DNA, 53 bp, Artificial Sequence
  Synthetic oligonucleotide
aggtcggtgcgcacgtaccctgcattctcatggaaatgcaatggattcattcc

SEQ ID NO: 1048 - DNA, 54 bp, Artificial Sequence
  Synthetic oligonucleotide
gtgtggtggcgcacgtactcctgttgcagtatcacgtaaatacctacttcgata

SEQ ID NO: 1049 - DNA, 67 bp, Artificial Sequence
  Synthetic oligonucleotide
gagacagaagaaagtaatcggaagtcgggtagctagctgttatggctattgctgaaacagcaaaatt

SEQ ID NO: 1050 - DNA, 65 bp, Artificial Sequence
  Synthetic oligonucleotide
acagtagagtaatatagtccgcgcacgtacccttacgacttcactgcaattgacgattcagttaa

SEQ ID NO: 1051 - DNA, 67 bp, Artificial Sequence
  Synthetic oligonucleotide
gagacagcaaaaaggtggttgtataaagtgcccctcataccaatgtaaagtatagttaacgccctgt

SEQ ID NO: 1052 - DNA, 61 bp, Artificial Sequence
  Synthetic oligonucleotide
gagacaggatggcacagtggagtaagcatctccatgactgcttgagcggctggagaatctg

SEQ ID NO: 1053 - DNA, 58 bp, Artificial Sequence
  Synthetic oligonucleotide
acagtagaggtcaccgcacgtacctttcgccacccatataaaccccacttcgtcctca

SEQ ID NO: 1054 - DNA, 60 bp, Artificial Sequence
  Synthetic oligonucleotide
cggtagaggttctgtacgcacgtaccaaggcagagcaaatgtgacactgtctatcagtac

SEQ ID NO: 1055 - DNA, 53 bp, Artificial Sequence
  Synthetic oligonucleotide
gggaggggacgcacgtaccctacatatataggaaaagggaaggtagaagagct

SEQ ID NO: 1056 - DNA, 66 bp, Artificial Sequence
  Synthetic oligonucleotide
gagacaggaaaatcgcatacgtcttgcatacccttctggaatttcttcctttgattttgccatttt

SEQ ID NO: 1057 - DNA, 59 bp, Artificial Sequence
  Synthetic oligonucleotide
gaggtggatcggtctagcacgtacctcctaaggttgctgatttggttgttggagaccca

SEQ ID NO: 1058 - DNA, 61 bp, Artificial Sequence
  Synthetic oligonucleotide
acggtagagctaagctagcacgtactcaaggcctagcctaaaggttcttgcagagcaacat

SEQ ID NO: 1059 - DNA, 53 bp, Artificial Sequence
  Synthetic oligonucleotide
cggcctgcagcacgtactcctaattagctctaggaaacacaaccccgggattt

SEQ ID NO: 1060 - DNA, 56 bp, Artificial Sequence
  Synthetic oligonucleotide
gaacgcctgaccagcacgtaccttgagttatacggaacttcgcaaaagtattccct

SEQ ID NO: 1061 - DNA, 73 bp, Artificial Sequence
  Synthetic oligonucleotide
gagacagaaatgcacagtagagtaaaatatcttgcctgccatccatcaacaactgctccaacagcctttccat

SEQ ID NO: 1062 - DNA, 62 bp, Artificial Sequence
  Synthetic oligonucleotide
gagacaggcacagtagaggtgaggataccggcacaagcagacaaaatcaacatggtcattta

SEQ ID NO: 1063 - DNA, 60 bp, Artificial Sequence
  Synthetic oligonucleotide
gagacagggcataaagggcacagtacgctcacgtgatctaccctagctgaccgctaatga

SEQ ID NO: 1064 - DNA, 60 bp, Artificial Sequence
  Synthetic oligonucleotide
gagacagtcaaggagcacggtagagctctaacctgcatacatatggcatttagttgttca

SEQ ID NO: 1065 - DNA, 63 bp, Artificial Sequence
  Synthetic oligonucleotide
ggcacggtagagaaatcgcataacgtacccttcttgaagacctatgtaaagaaacgggtcact

SEQ ID NO: 1066 - DNA, 66 bp, Artificial Sequence
  Synthetic oligonucleotide
gagacagaggataaggtcgtgtaataggtggccatacgcatgactacattacaacgggccaggaag

SEQ ID NO: 1067 - DNA, 64 bp, Artificial Sequence
  Synthetic oligonucleotide
gagacagagaagaaagtaagcgttggcaccaggtctcgatctcgtacaaaacgactatgaccat

SEQ ID NO: 1068 - DNA, 60 bp, Artificial Sequence
  Synthetic oligonucleotide
ccggctatgactgcttgaacgtactcatgaacgtgtcgtgttatgcagcggtatgtcgtg

SEQ ID NO: 1069 - DNA, 59 bp, Artificial Sequence
  Synthetic oligonucleotide
gagacagtttggtggcacggtagacgtcgtgtcttagacgactgtgtgtgattctcgag

SEQ ID NO: 1070 - DNA, 58 bp, Artificial Sequence
  Synthetic oligonucleotide
gcgaaatgactgcgcaacgtactccaccgttttgccagttccaccagtaactgtaagg

SEQ ID NO: 1071 - DNA, 61 bp, Artificial Sequence
  Synthetic oligonucleotide
agagtactaccgcctgacaacgtactcgccctggaacaacggttatattctctggcagaac

SEQ ID NO: 1072 - DNA, 38 bp, Artificial Sequence
  Synthetic oligonucleotide
tcggacttgatctacacattgacacattgataccctga

SEQ ID NO: 1073 - DNA, 37 bp, Artificial Sequence
  Synthetic oligonucleotide
cgtttgacttagacggactgccttgatcactgactga

SEQ ID NO: 1074 - DNA, 37 bp, Artificial Sequence
  Synthetic oligonucleotide
gagttctccttaaaatctgaccctgacaacgagtgga

SEQ ID NO: 1075 - DNA, 38 bp, Artificial Sequence
  Synthetic oligonucleotide
atactggaggtcatgattctgatcccgtgatattctga

SEQ ID NO: 1076 - DNA, 38 bp, Artificial Sequence
  Synthetic oligonucleotide
ggatacacgggagtctgcgttgacacattttgatttga

SEQ ID NO: 1077 - DNA, 38 bp, Artificial Sequence
  Synthetic oligonucleotide
gtttgcaattgcttaggatactcaacctgactccatga

SEQ ID NO: 1078 - DNA, 38 bp, Artificial Sequence
  Synthetic oligonucleotide
gcggtatttatgataatgactcgtgaccccaatattga

SEQ ID NO: 1079 - DNA, 38 bp, Artificial Sequence
  Synthetic oligonucleotide
ggtcagctagtaaagtttatccgatgatttgattttga

SEQ ID NO: 1080 - DNA, 37 bp, Artificial Sequence
  Synthetic oligonucleotide
gcaggatagtcatgcaaaatattcaacgataattaga

SEQ ID NO: 1081 - DNA, 38 bp, Artificial Sequence
  Synthetic oligonucleotide
tgtgactataacgcactaagccgattctgacgatatga

SEQ ID NO: 1082 - DNA, 38 bp, Artificial Sequence
  Synthetic oligonucleotide
ttttgtacctgcttcgataaccaacagttaggatttga

SEQ ID NO: 1083 - DNA, 38 bp, Artificial Sequence
  Synthetic oligonucleotide
gactatcaaatgaccccgatcgatacgtaggacactga

SEQ ID NO: 1084 - DNA, 36 bp, Artificial Sequence
  Synthetic oligonucleotide
aactggccgtgtgtgccggtgggataactgttacta

SEQ ID NO: 1085 - DNA, 36 bp, Artificial Sequence
  Synthetic oligonucleotide
gaggactagccgatacttgataatgattatgacgta

SEQ ID NO: 1086 - DNA, 37 bp, Artificial Sequence
  Synthetic oligonucleotide
gtgaatgacacacgtctgaccttggatcgctgattga

SEQ ID NO: 1087 - DNA, 38 bp, Artificial Sequence
  Synthetic oligonucleotide
accgtggacttattgcttatattggacttagagcctga

SEQ ID NO: 1088 - DNA, 36 bp, Artificial Sequence
  Synthetic oligonucleotide
gaggacgtacgccttgatgtttaactggattactga

SEQ ID NO: 1089 - DNA, 36 bp, Artificial Sequence
  Synthetic oligonucleotide
caccccttttgattatccttattgatacttatatga

SEQ ID NO: 1090 - DNA, 38 bp, Artificial Sequence
  Synthetic oligonucleotide
tcccgtgatgtgggaacgtagatctttgactgatttga

SEQ ID NO: 1091 - DNA, 38 bp, Artificial Sequence
  Synthetic oligonucleotide
tcgtaatgcccaataaccaactggttaagtagacctga

SEQ ID NO: 1092 - DNA, 36 bp, Artificial Sequence
  Synthetic oligonucleotide
gcgatcacaatttaccggaccgatctccctagacaa

SEQ ID NO: 1093 - DNA, 36 bp, Artificial Sequence
  Synthetic oligonucleotide
gcgtacggaacggaaccgacacaacctgaataccta

SEQ ID NO: 1094 - DNA, 36 bp, Artificial Sequence
  Synthetic oligonucleotide
gcgtacggaacggaaccgacacaacctgaataccga

SEQ ID NO: 1095 - DNA, 38 bp, Artificial Sequence
  Synthetic oligonucleotide
gcttgaatccacgacgaaattacttaaaataaccctga

SEQ ID NO: 1096 - DNA, 38 bp, Artificial Sequence
  Synthetic oligonucleotide
gccggggcggagcctacgatttatatcgcgattattga

SEQ ID NO: 1097 - DNA, 38 bp, Artificial Sequence
  Synthetic oligonucleotide
aagtgcacactgcctcgatttacatttcggacctatga

SEQ ID NO: 1098 - DNA, 38 bp, Artificial Sequence
  Synthetic oligonucleotide
gcgtactgtgcgcgattccgggatatatattcgattga

SEQ ID NO: 1099 - DNA, 38 bp, Artificial Sequence
  Synthetic oligonucleotide
cacagacgttctcgttgatacccggacccgatatttga

SEQ ID NO: 1100 - DNA, 38 bp, Artificial Sequence
  Synthetic oligonucleotide
tccattttggaacgtcgaattactcggatactaattga

SEQ ID NO: 1101 - DNA, 38 bp, Artificial Sequence
  Synthetic oligonucleotide
actcgacgtaaaactatctgtgactcctaatacattga

SEQ ID NO: 1102 - DNA, 38 bp, Artificial Sequence
  Synthetic oligonucleotide
accgtaacttgctagccttccggatccctccaatctga

SEQ ID NO: 1103 - DNA, 38 bp, Artificial Sequence
  Synthetic oligonucleotide
ttcgtacagatacccccgataccccgccacctgattga

SEQ ID NO: 1104 - DNA, 34 bp, Artificial Sequence
  Synthetic oligonucleotide
atattaatgccttgatccgactccgacctcttga

SEQ ID NO: 1105 - DNA, 38 bp, Artificial Sequence
  Synthetic oligonucleotide
ttgacgcgacgtactattttgatcgtattccaatctga

SEQ ID NO: 1106 - DNA, 38 bp, Artificial Sequence
  Synthetic oligonucleotide
gcgccgccacggtacttaaaaactcggactttacttga

SEQ ID NO: 1107 - DNA, 38 bp, Artificial Sequence
  Synthetic oligonucleotide
cgtagtactgctacatccgaaccgaccataaatactga

SEQ ID NO: 1108 - DNA, 38 bp, Artificial Sequence
  Synthetic oligonucleotide
gaggacgcagttgaccggatttccaccgattatattga

SEQ ID NO: 1109 - DNA, 38 bp, Artificial Sequence
  Synthetic oligonucleotide
gaggactgaaccatctcggaccacccatggatacttga

SEQ ID NO: 1110 - DNA, 38 bp, Artificial Sequence
  Synthetic oligonucleotide
tgcgcgagcaaacgcgactattgaaccttagaacctga

SEQ ID NO: 1111 - DNA, 35 bp, Artificial Sequence
  Synthetic oligonucleotide
gctggtgacccctcttgaccttccttattgatttg

SEQ ID NO: 1112 - DNA, 38 bp, Artificial Sequence
  Synthetic oligonucleotide
gagtacctcaccgctttcgattatcgttctgaccttga

SEQ ID NO: 1113 - DNA, 36 bp, Artificial Sequence
  Synthetic oligonucleotide
agccacttcctgctttgaaccggactccttatataa

SEQ ID NO: 1114 - DNA, 38 bp, Artificial Sequence
  Synthetic oligonucleotide
attgagcgtacgcatctaccggattaccttacttttga

SEQ ID NO: 1115 - DNA, 37 bp, Artificial Sequence
  Synthetic oligonucleotide
gaacttacgttactaacctgactctatcttacattga

SEQ ID NO: 1116 - DNA, 37 bp, Artificial Sequence
  Synthetic oligonucleotide
gcaccactattgtgggaattcctgattttactattga

SEQ ID NO: 1117 - DNA, 37 bp, Artificial Sequence
  Synthetic oligonucleotide
gcgtgcctgcctggctctgactccgattattcattga

SEQ ID NO: 1118 - DNA, 38 bp, Artificial Sequence
  Synthetic oligonucleotide
agttccttactaacacaacttttggatatttaaattga

SEQ ID NO: 1119 - DNA, 37 bp, Artificial Sequence
  Synthetic oligonucleotide
actgccttttcttactgggatacttattgattattga

SEQ ID NO: 1120 - DNA, 38 bp, Artificial Sequence
  Synthetic oligonucleotide
atagtacactacctactgactccctatattatgaatga

SEQ ID NO: 1121 - DNA, 38 bp, Artificial Sequence
  Synthetic oligonucleotide
gcgatacaacccttcatttctgactaccgatatattga

SEQ ID NO: 1122 - DNA, 36 bp, Artificial Sequence
  Synthetic oligonucleotide
gcatctttcttcttaatgatttaccgttctcacata

SEQ ID NO: 1123 - DNA, 36 bp, Artificial Sequence
  Synthetic oligonucleotide
accacgtgttattctctgtatttcactttgtctcaa

SEQ ID NO: 1124 - DNA, 36 bp, Artificial Sequence
  Synthetic oligonucleotide
accgggaacatttctgtcgtttcatttcatcactaa

SEQ ID NO: 1125 - DNA, 36 bp, Artificial Sequence
  Synthetic oligonucleotide
agtttattgctccttcccactattgtctatctcgca

SEQ ID NO: 1126 - DNA, 36 bp, Artificial Sequence
  Synthetic oligonucleotide
tcgcttccttgtacttcctatacccttttcaccaca

SEQ ID NO: 1127 - DNA, 35 bp, Artificial Sequence
  Synthetic oligonucleotide
actaactcgcccactcttctcatttggaacctatc

SEQ ID NO: 1128 - DNA, 36 bp, Artificial Sequence
  Synthetic oligonucleotide
actccccctcagctatcatacatcactcgcatctaa

SEQ ID NO: 1129 - DNA, 38 bp, Artificial Sequence
  Synthetic oligonucleotide
aatatatacgcgctacaaatcttttctcctactgatga

SEQ ID NO: 1130 - DNA, 37 bp, Artificial Sequence
  Synthetic oligonucleotide
actatactcacatcctatttaattattggcttaatga

SEQ ID NO: 1131 - DNA, 38 bp, Artificial Sequence
  Synthetic oligonucleotide
atcgatcctgcctaacctggtaaacaactcatttctga

SEQ ID NO: 1132 - DNA, 35 bp, Artificial Sequence
  Synthetic oligonucleotide
ttagctgcttcccagacccaagctattatttttca

SEQ ID NO: 1133 - DNA, 36 bp, Artificial Sequence
  Synthetic oligonucleotide
tccctgcatcttaacttctatagggtttgcttaaaa

SEQ ID NO: 1134 - DNA, 36 bp, Artificial Sequence
  Synthetic oligonucleotide
gggtcactccgtaaggcctctactccaaattataaa

SEQ ID NO: 1135 - DNA, 36 bp, Artificial Sequence
  Synthetic oligonucleotide
aactgtacggcgcaattttactctcaagtaccaaca

SEQ ID NO: 1136 - DNA, 35 bp, Artificial Sequence
  Synthetic oligonucleotide
tgcggactttattcgcttgatgcctatcctgttat

SEQ ID NO: 1137 - DNA, 36 bp, Artificial Sequence
  Synthetic oligonucleotide
tccgccacatcgggttatacttttgaactagttaaa

SEQ ID NO: 1138 - DNA, 38 bp, Artificial Sequence
  Synthetic oligonucleotide
tgttccttcgagttccatcccaaagagttaattcatga

SEQ ID NO: 1139 - DNA, 35 bp, Artificial Sequence
  Synthetic oligonucleotide
tcctgcgactctacggtatattcctttaatcgaca

SEQ ID NO: 1140 - DNA, 38 bp, Artificial Sequence
  Synthetic oligonucleotide
agtaaaattccggttcatccacactgagctttcaatga

SEQ ID NO: 1141 - DNA, 36 bp, Artificial Sequence
  Synthetic oligonucleotide
ttaactccttgaagtacgtcctaggccccctcacca

SEQ ID NO: 1142 - DNA, 36 bp, Artificial Sequence
  Synthetic oligonucleotide
tggagtactggtgccgaacgtttttgaacgggttga

SEQ ID NO: 1143 - DNA, 38 bp, Artificial Sequence
  Synthetic oligonucleotide
gagtactatagagccaagacctcatttagtcactctga

SEQ ID NO: 1144 - DNA, 36 bp, Artificial Sequence
  Synthetic oligonucleotide
ccgacccataacactttcgcttcaagcatctaggca

SEQ ID NO: 1145 - DNA, 36 bp, Artificial Sequence
  Synthetic oligonucleotide
cgtccgcacccctttttcaccttgttctgctatgca

SEQ ID NO: 1146 - DNA, 35 bp, Artificial Sequence
  Synthetic oligonucleotide
gagcctctgtaacccaatcttcaactgcagggacc

SEQ ID NO: 1147 - DNA, 35 bp, Artificial Sequence
  Synthetic oligonucleotide
gagttctccagctagatattccaatacggaaccga

SEQ ID NO: 1148 - DNA, 38 bp, Artificial Sequence
  Synthetic oligonucleotide
gagtattgcgaagattgggtttatcggttctaacatga

SEQ ID NO: 1149 - DNA, 37 bp, Artificial Sequence
  Synthetic oligonucleotide
aaacgctattacggctgacccggtgactcgggattga

SEQ ID NO: 1150 - DNA, 36 bp, Artificial Sequence
  Synthetic oligonucleotide
accgactccagtttcacgggaatattctcaccggga

SEQ ID NO: 1151 - DNA, 38 bp, Artificial Sequence
  Synthetic oligonucleotide
gttgtcggtttccattagttcgatatcttgccgtgaga

SEQ ID NO: 1152 - DNA, 38 bp, Artificial Sequence
  Synthetic oligonucleotide
atgggaatcacgtagctgtaacgataatccatgggtga

SEQ ID NO: 1153 - DNA, 35 bp, Artificial Sequence
  Synthetic oligonucleotide
aggtactgacgattctttaaagtgactactggtga

SEQ ID NO: 1154 - DNA, 38 bp, Artificial Sequence
  Synthetic oligonucleotide
ggcggtggaagtccgaactgccgagttaaattccctga

SEQ ID NO: 1155 - DNA, 38 bp, Artificial Sequence
  Synthetic oligonucleotide
tatcggtcttacgaaagccggcacgtacgtttctttga

SEQ ID NO: 1156 - DNA, 38 bp, Artificial Sequence
  Synthetic oligonucleotide
tgacggatgataggcatgacctcgtagaccacatctga

SEQ ID NO: 1157 - DNA, 38 bp, Artificial Sequence
  Synthetic oligonucleotide
tttgtaccatccttacaaatgagatcttgttatgttga

SEQ ID NO: 1158 - DNA, 36 bp, Artificial Sequence
  Synthetic oligonucleotide
tacatgcgtactataaaccctattgtttactggtaa

SEQ ID NO: 1159 - DNA, 35 bp, Artificial Sequence
  Synthetic oligonucleotide
gcaagtctagatcttcattcatttgttcatgtttt

SEQ ID NO: 1160 - DNA, 35 bp, Artificial Sequence
  Synthetic oligonucleotide
gagtttgcgggaatcttccccgaacaaggggctaa

SEQ ID NO: 1161 - DNA, 35 bp, Artificial Sequence
  Synthetic oligonucleotide
tagaccgttggaggtccggggttggtgcccgatta

SEQ ID NO: 1162 - DNA, 37 bp, Artificial Sequence
  Synthetic oligonucleotide
acactcatacgagatctgattatacacgcgccttgga

SEQ ID NO: 1163 - DNA, 37 bp, Artificial Sequence
  Synthetic oligonucleotide
gtcgtcgggagaccacttatcttttttccatgccgga

SEQ ID NO: 1164 - DNA, 35 bp, Artificial Sequence
  Synthetic oligonucleotide
tcacctgacgttacactcctccgtacaaacgtgta

SEQ ID NO: 1165 - DNA, 35 bp, Artificial Sequence
  Synthetic oligonucleotide
tcctgattaattcatggtcacaactcccggtttcc

SEQ ID NO: 1166 - DNA, 36 bp, Artificial Sequence
  Synthetic oligonucleotide
tccttttgcccatgattattctcgatgtaaaaacga

SEQ ID NO: 1167 - DNA, 37 bp, Artificial Sequence
  Synthetic oligonucleotide
aacgctaatatctgccgatgggaatcctcgattagga

SEQ ID NO: 1168 - DNA, 37 bp, Artificial Sequence
  Synthetic oligonucleotide
agggtgatatttacgttatcttcgaatttctactgga

SEQ ID NO: 1169 - DNA, 36 bp, Artificial Sequence
  Synthetic oligonucleotide
tctcacttacaaagcgtttaatcaacgcagttctta

SEQ ID NO: 1170 - DNA, 37 bp, Artificial Sequence
  Synthetic oligonucleotide
ccgcaaacttaggggctaataattttcgttatccgga

SEQ ID NO: 1171 - DNA, 37 bp, Artificial Sequence
  Synthetic oligonucleotide
tgccagaaaatcgaatttttatacgtaatggcatgga

SEQ ID NO: 1172 - DNA, 35 bp, Artificial Sequence
  Synthetic oligonucleotide
atcgatcctgacgccgaaaacttgacacgactaaa

SEQ ID NO: 1173 - DNA, 35 bp, Artificial Sequence
  Synthetic oligonucleotide
atgctggtaacttttgcacatcttacttggtaaac

SEQ ID NO: 1174 - DNA, 36 bp, Artificial Sequence
  Synthetic oligonucleotide
gcgattactcagcacccccttacttgtttttaatca

SEQ ID NO: 1175 - DNA, 35 bp, Artificial Sequence
  Synthetic oligonucleotide
actgcgggactatctgaattattggtattataaca

SEQ ID NO: 1176 - DNA, 36 bp, Artificial Sequence
  Synthetic oligonucleotide
gagtactgaaggaactggaaccgagtattcttgtca

SEQ ID NO: 1177 - DNA, 36 bp, Artificial Sequence
  Synthetic oligonucleotide
gagaactgcctggtaatatattcccaaacctggaca

SEQ ID NO: 1178 - DNA, 36 bp, Artificial Sequence
  Synthetic oligonucleotide
gagtgcgtaggtcttacatcctatcgaatatttaca

SEQ ID NO: 1179 - DNA, 36 bp, Artificial Sequence
  Synthetic oligonucleotide
ctcagactttacacaatctttctctccacacaagca

SEQ ID NO: 1180 - DNA, 35 bp, Artificial Sequence
  Synthetic oligonucleotide
gccactttcagaatctcgtgtcacacccatcatca

SEQ ID NO: 1181 - DNA, 36 bp, Artificial Sequence
  Synthetic oligonucleotide
gcgttccccgtggacaatatcactttcttatcgtca

SEQ ID NO: 1182 - DNA, 35 bp, Artificial Sequence
  Synthetic oligonucleotide
tcctggtctacgacttacatctgatccgacccaaa

SEQ ID NO: 1183 - DNA, 36 bp, Artificial Sequence
  Synthetic oligonucleotide
ggaccttatttgttcgacccccgttatcacctgaaa

SEQ ID NO: 1184 - DNA, 35 bp, Artificial Sequence
  Synthetic oligonucleotide
gaggacttttactgatcaaccccacctttcgaaaa

SEQ ID NO: 1185 - DNA, 36 bp, Artificial Sequence
  Synthetic oligonucleotide
gctactacttatccgactactctaaaaacaactaca

SEQ ID NO: 1186 - DNA, 35 bp, Artificial Sequence
  Synthetic oligonucleotide
aactgtcatccgccgactaactcaatctaactcaa

SEQ ID NO: 1187 - DNA, 35 bp, Artificial Sequence
  Synthetic oligonucleotide
aactgtcatccgccgactaactcaatctaactcta

SEQ ID NO: 1188 - DNA, 35 bp, Artificial Sequence
  Synthetic oligonucleotide
aactgtcatccgccgactaactcaatctaactcga

SEQ ID NO: 1189 - DNA, 35 bp, Artificial Sequence
  Synthetic oligonucleotide
tactccggcccaactatatacttctccacaccaac

SEQ ID NO: 1190 - DNA, 35 bp, Artificial Sequence
  Synthetic oligonucleotide
tactccggcccaactatatacttctccacaccatc

SEQ ID NO: 1191 - DNA, 35 bp, Artificial Sequence
  Synthetic oligonucleotide
tactccggcccaactatatacttctccacaccagc

SEQ ID NO: 1192 - DNA, 35 bp, Artificial Sequence
  Synthetic oligonucleotide
tcctacctgcccaatccccttttgattacatatat

SEQ ID NO: 1193 - DNA, 35 bp, Artificial Sequence
  Synthetic oligonucleotide
ccacgctttggggacgctattactatccctttcaa

SEQ ID NO: 1194 - DNA, 35 bp, Artificial Sequence
  Synthetic oligonucleotide
aatgtactgataatcccttttacactggttactat

SEQ ID NO: 1195 - DNA, 35 bp, Artificial Sequence
  Synthetic oligonucleotide
ttagtcgtacttttatctatattgggcctaataaa

SEQ ID NO: 1196 - DNA, 36 bp, Artificial Sequence
  Synthetic oligonucleotide
ttcgccacgttcctaaatattttacttattactaaa

SEQ ID NO: 1197 - DNA, 36 bp, Artificial Sequence
  Synthetic oligonucleotide
ttccatgactctgcctatacttattatatctcataa

SEQ ID NO: 1198 - DNA, 36 bp, Artificial Sequence
  Synthetic oligonucleotide
ttggagctacaatcaaacttcatatctctttctaaa

SEQ ID NO: 1199 - DNA, 36 bp, Artificial Sequence
  Synthetic oligonucleotide
tgcccaaaactgcctttagaaacttattacattcaa

SEQ ID NO: 1200 - DNA, 36 bp, Artificial Sequence
  Synthetic oligonucleotide
tctgcgatcgccatttatctcgaccctttacctaaa

SEQ ID NO: 1201 - DNA, 35 bp, Artificial Sequence
  Synthetic oligonucleotide
aacttttttgcactaacctggacctcatatataat

SEQ ID NO: 1202 - DNA, 34 bp, Artificial Sequence
  Synthetic oligonucleotide
aaccgcttttcacactaccactcacgctctcata

SEQ ID NO: 1203 - DNA, 36 bp, Artificial Sequence
  Synthetic oligonucleotide
ccgccgtacccacgctccaattattctcatcctaca

SEQ ID NO: 1204 - DNA, 36 bp, Artificial Sequence
  Synthetic oligonucleotide
tatctccgtccaacacatctctggtcaccacctcca

SEQ ID NO: 1205 - DNA, 35 bp, Artificial Sequence
  Synthetic oligonucleotide
tttctccgctcatcataactgacgccatccactca

SEQ ID NO: 1206 - DNA, 35 bp, Artificial Sequence
  Synthetic oligonucleotide
acttcgctcattcacttgccaactcctgcacaatc

SEQ ID NO: 1207 - DNA, 37 bp, Artificial Sequence
  Synthetic oligonucleotide
tccctcaccgttgcccttattccgtactcacttatga

SEQ ID NO: 1208 - DNA, 36 bp, Artificial Sequence
  Synthetic oligonucleotide
gtgcttctccttttgactcgcctcactcttggtcca

SEQ ID NO: 1209 - DNA, 36 bp, Artificial Sequence
  Synthetic oligonucleotide
ttttctcctcactccgctccgtgccttgacatcaaa

SEQ ID NO: 1210 - DNA, 37 bp, Artificial Sequence
  Synthetic oligonucleotide
taccttcttcaatatccgtccgcttaacctggattca

SEQ ID NO: 1211 - DNA, 36 bp, Artificial Sequence
  Synthetic oligonucleotide
cctcctctgcctaaatacgttttctccaccatcata

SEQ ID NO: 1212 - DNA, 36 bp, Artificial Sequence
  Synthetic oligonucleotide
acttttttaaattttgttcccacgtatccttaatta

SEQ ID NO: 1213 - DNA, 38 bp, Artificial Sequence
  Synthetic oligonucleotide
ttttccgggtttcttctccagtaggttgacttttatga

SEQ ID NO: 1214 - DNA, 35 bp, Artificial Sequence
  Synthetic oligonucleotide
tgttttggcctccacggtttagtacttattttttt

SEQ ID NO: 1215 - DNA, 35 bp, Artificial Sequence
  Synthetic oligonucleotide
gacttttttgctcatattttcaccaatcaattcca

SEQ ID NO: 1216 - DNA, 36 bp, Artificial Sequence
  Synthetic oligonucleotide
tgagttctcttttatattggtcgccactttttccaa

SEQ ID NO: 1217 - DNA, 36 bp, Artificial Sequence
  Synthetic oligonucleotide
ttccttcacttgggctttcaaatcatttataaacaa

SEQ ID NO: 1218 - DNA, 38 bp, Artificial Sequence
  Synthetic oligonucleotide
ttcttgacttcagttcgattttgttattcttagtttga

SEQ ID NO: 1219 - DNA, 38 bp, Artificial Sequence
  Synthetic oligonucleotide
gttaattccttgctcgagtttttccgcttattccttga

SEQ ID NO: 1220 - DNA, 37 bp, Artificial Sequence
  Synthetic oligonucleotide
ggtacatttcgtccctaccattggtttattcttttga

SEQ ID NO: 1221 - DNA, 37 bp, Artificial Sequence
  Synthetic oligonucleotide
attatttttcgttctctcacttgttttcgatcattga

SEQ ID NO: 1222 - DNA, 35 bp, Artificial Sequence
  Synthetic oligonucleotide
taattgagcttttgctcctaacggcgagagccgtt

SEQ ID NO: 1223 - DNA, 36 bp, Artificial Sequence
  Synthetic oligonucleotide
tgatatacgcgcgagtagaacatcaaccagtgagaa

SEQ ID NO: 1224 - DNA, 38 bp, Artificial Sequence
  Synthetic oligonucleotide
taagccgagcgcatgtaggttcgttttcacgagagtga

SEQ ID NO: 1225 - DNA, 35 bp, Artificial Sequence
  Synthetic oligonucleotide
atgaacgcgagtgaggacgctttagttaattatgt

SEQ ID NO: 1226 - DNA, 37 bp, Artificial Sequence
  Synthetic oligonucleotide
actcggatagcggggccgggggaggcctacacattga

SEQ ID NO: 1227 - DNA, 38 bp, Artificial Sequence
  Synthetic oligonucleotide
acgcagtccgtaaattgataaccgggaggttcgagtga

SEQ ID NO: 1228 - DNA, 35 bp, Artificial Sequence
  Synthetic oligonucleotide
agtcccacgagagtggttctctctagataagagga

SEQ ID NO: 1229 - DNA, 37 bp, Artificial Sequence
  Synthetic oligonucleotide
gagtaccataacaaggcctgaagaaccttgcaggtga

SEQ ID NO: 1230 - DNA, 38 bp, Artificial Sequence
  Synthetic oligonucleotide
gcggggtgtgaacccgctcgtatgtaacaacggattga

SEQ ID NO: 1231 - DNA, 37 bp, Artificial Sequence
  Synthetic oligonucleotide
gagtacggttacggtgagtaaccatttagacgtaaga

SEQ ID NO: 1232 - DNA, 38 bp, Artificial Sequence
  Synthetic oligonucleotide
tgggatccgcgaggatctgatggggttcttatgtttga

SEQ ID NO: 1233 - DNA, 36 bp, Artificial Sequence
  Synthetic oligonucleotide
gagtacccgggcagggagccagttattatgttttga

SEQ ID NO: 1234 - DNA, 36 bp, Artificial Sequence
  Synthetic oligonucleotide
gagtacctagatatctcaaaagatatttatcgttaa

SEQ ID NO: 1235 - DNA, 35 bp, Artificial Sequence
  Synthetic oligonucleotide
gagtactctgcgcaagtgttgaactttgtagaaat

SEQ ID NO: 1236 - DNA, 36 bp, Artificial Sequence
  Synthetic oligonucleotide
gagtacttcccgcggggttatggaatgaattggata

SEQ ID NO: 1237 - DNA, 38 bp, Artificial Sequence
  Synthetic oligonucleotide
taatgtctcttccgccgtagtacgagcggttccgctga

SEQ ID NO: 1238 - DNA, 38 bp, Artificial Sequence
  Synthetic oligonucleotide
gagtacagccgcccttgtaccgaggccttattaagtga

SEQ ID NO: 1239 - DNA, 38 bp, Artificial Sequence
  Synthetic oligonucleotide
ttagtttaccgtcaaaggcctcataatgttacaactga

SEQ ID NO: 1240 - DNA, 38 bp, Artificial Sequence
  Synthetic oligonucleotide
cgtagtattgcgggctcgtctcattgcattcctattga

SEQ ID NO: 1241 - DNA, 38 bp, Artificial Sequence
  Synthetic oligonucleotide
cgtgagacgtggttgcccaccacagtgaataaatttga

SEQ ID NO: 1242 - DNA, 37 bp, Artificial Sequence
  Synthetic oligonucleotide
gctccactatttaaccgtgagttgttaaccgggggga

SEQ ID NO: 1243 - DNA, 37 bp, Artificial Sequence
  Synthetic oligonucleotide
gctccagtaccgctgtacgaattatttaagaaaacga

SEQ ID NO: 1244 - DNA, 36 bp, Artificial Sequence
  Synthetic oligonucleotide
gcccacatttttttcgagtgtgtaaggggtgagaaa

SEQ ID NO: 1245 - DNA, 37 bp, Artificial Sequence
  Synthetic oligonucleotide
gcttattccggatgttgcctgcaattaggggactcga

SEQ ID NO: 1246 - DNA, 37 bp, Artificial Sequence
  Synthetic oligonucleotide
gcttgtctcgcggttttgaaagtaatctttaacgaga

SEQ ID NO: 1247 - DNA, 35 bp, Artificial Sequence
  Synthetic oligonucleotide
gcgcgaaagctcaaataaaactaaagtacaacaaa

SEQ ID NO: 1248 - DNA, 36 bp, Artificial Sequence
  Synthetic oligonucleotide
gctaagctgggagaaaatcacaccctcgatcgtaaa

SEQ ID NO: 1249 - DNA, 37 bp, Artificial Sequence
  Synthetic oligonucleotide
ctcacattagggctcggtaaatataacgatctgacga

SEQ ID NO: 1250 - DNA, 35 bp, Artificial Sequence
  Synthetic oligonucleotide
actgtagctattatgaaagtctgggttattggcct

SEQ ID NO: 1251 - DNA, 35 bp, Artificial Sequence
  Synthetic oligonucleotide
aatcgtatggagcgttgaacaaatgaacccgtagt

SEQ ID NO: 1252 - DNA, 38 bp, Artificial Sequence
  Synthetic oligonucleotide
agatatacttgaaaggtggtattatgaatgttgggtga

SEQ ID NO: 1253 - DNA, 38 bp, Artificial Sequence
  Synthetic oligonucleotide
atggtgactcaattaaaatgtgaggtgggggagctaga

SEQ ID NO: 1254 - DNA, 37 bp, Artificial Sequence
  Synthetic oligonucleotide
tcgtggagggtattgaccttctaatgatgggggggga

SEQ ID NO: 1255 - DNA, 38 bp, Artificial Sequence
  Synthetic oligonucleotide
ggttcctatgaaggacacggggggggaggtatcaatga

SEQ ID NO: 1256 - DNA, 37 bp, Artificial Sequence
  Synthetic oligonucleotide
aaggggcggtagactttaggggctgaatggggtggga

SEQ ID NO: 1257 - DNA, 37 bp, Artificial Sequence
  Synthetic oligonucleotide
gagtgcactggatgaattttgaggggggaaggaccga

SEQ ID NO: 1258 - DNA, 37 bp, Artificial Sequence
  Synthetic oligonucleotide
tgcggtgggtggtgggtgggaaataattatgtgggga

SEQ ID NO: 1259 - DNA, 37 bp, Artificial Sequence
  Synthetic oligonucleotide
taccagactggaagtcaatgatcatggttgtctccga

SEQ ID NO: 1260 - DNA, 36 bp, Artificial Sequence
  Synthetic oligonucleotide
aacggtacaacatctgctagagaactgcaacttcta

SEQ ID NO: 1261 - DNA, 36 bp, Artificial Sequence
  Synthetic oligonucleotide
actatatccaatgctatgcgcgcattcagggtagaa

SEQ ID NO: 1262 - DNA, 35 bp, Artificial Sequence
  Synthetic oligonucleotide
agcatcggccgatcgcctcaatcacgttttcgatt

SEQ ID NO: 1263 - DNA, 38 bp, Artificial Sequence
  Synthetic oligonucleotide
aggcttacaatacgttaccccttcttcgtagacggtga

SEQ ID NO: 1264 - DNA, 36 bp, Artificial Sequence
  Synthetic oligonucleotide
cttgacgtcacatttgcctaacactgtaggtcacaa

SEQ ID NO: 1265 - DNA, 35 bp, Artificial Sequence
  Synthetic oligonucleotide
tctggtagcacatgagtttggcattcctctctgca

SEQ ID NO: 1266 - DNA, 35 bp, Artificial Sequence
  Synthetic oligonucleotide
tgttgtccgtatatattccttgtgtgttaattccg

SEQ ID NO: 1267 - DNA, 35 bp, Artificial Sequence
  Synthetic oligonucleotide
gagcactataagtgtgtatctatttgtaactttct

SEQ ID NO: 1268 - DNA, 35 bp, Artificial Sequence
  Synthetic oligonucleotide
tgtggaggcactcttgtatgattgatttcgtatct

SEQ ID NO: 1269 - DNA, 36 bp, Artificial Sequence
  Synthetic oligonucleotide
aatctaacgcatcaaatacgtttgggtagtcattaa

SEQ ID NO: 1270 - DNA, 35 bp, Artificial Sequence
  Synthetic oligonucleotide
tggtcaacgttatcgtatcctactgatcactaact

SEQ ID NO: 1271 - DNA, 36 bp, Artificial Sequence
  Synthetic oligonucleotide
ttgtcgcaccacatcataggtgccacgatgtcccaa

SEQ ID NO: 1272 - DNA, 36 bp, Artificial Sequence
  Synthetic oligonucleotide
actgttacaacagaagggttagatcacatactacaa

SEQ ID NO: 1273 - DNA, 35 bp, Artificial Sequence
  Synthetic oligonucleotide
actcgagggaactaggaactactacaacagtgtgt

SEQ ID NO: 1274 - DNA, 38 bp, Artificial Sequence
  Synthetic oligonucleotide
ccatgaaactacaacatatcaagtcgagtgtggtgtga

SEQ ID NO: 1275 - DNA, 37 bp, Artificial Sequence
  Synthetic oligonucleotide
cggccgacgtagctcaaattctacactatggttgtga

SEQ ID NO: 1276 - DNA, 38 bp, Artificial Sequence
  Synthetic oligonucleotide
ggcagtactatcaacttacatgccaatattcgatgtga

SEQ ID NO: 1277 - DNA, 36 bp, Artificial Sequence
  Synthetic oligonucleotide
gctaccagcgttgcagtctgcggattctgtcaaata

SEQ ID NO: 1278 - DNA, 35 bp, Artificial Sequence
  Synthetic oligonucleotide
cttactcaaagtggcgtgtaggtcattaggttgta

SEQ ID NO: 1279 - DNA, 36 bp, Artificial Sequence
  Synthetic oligonucleotide
cgtagtactagcaacattagggtcgtaacataacta

SEQ ID NO: 1280 - DNA, 36 bp, Artificial Sequence
  Synthetic oligonucleotide
acgaccgtggggttagggcgcatattctttggctta

SEQ ID NO: 1281 - DNA, 37 bp, Artificial Sequence
  Synthetic oligonucleotide
tactctcatgggtatctttctgaatcgaacgttgtga

SEQ ID NO: 1282 - DNA, 35 bp, Artificial Sequence
  Synthetic oligonucleotide
gcggtttaacctcgaaagtaagggcgattaggcga

SEQ ID NO: 1283 - DNA, 35 bp, Artificial Sequence
  Synthetic oligonucleotide
gcgggttcaaattgaggaggaaagacgaaagctct

SEQ ID NO: 1284 - DNA, 38 bp, Artificial Sequence
  Synthetic oligonucleotide
gatcgaatcgatactgcagcggagtgacacgggtctaa

SEQ ID NO: 1285 - DNA, 35 bp, Artificial Sequence
  Synthetic oligonucleotide
tagtccgggtcgttttaaattcagtttggcatttt

SEQ ID NO: 1286 - DNA, 35 bp, Artificial Sequence
  Synthetic oligonucleotide
aaccaggcatagttggccgcaggcaaccccatttt

SEQ ID NO: 1287 - DNA, 35 bp, Artificial Sequence
  Synthetic oligonucleotide
agtccaaacacgaggttccgtcgcgagaactttaa

SEQ ID NO: 1288 - DNA, 37 bp, Artificial Sequence
  Synthetic oligonucleotide
agtccggcaaggggcgcaacttatcatagtcctctga

SEQ ID NO: 1289 - DNA, 35 bp, Artificial Sequence
  Synthetic oligonucleotide
taggctcccgcctttagcttagtttcagatagcaa

SEQ ID NO: 1290 - DNA, 35 bp, Artificial Sequence
  Synthetic oligonucleotide
cgcggtattttgcctcaaactagtcgttaatctat

SEQ ID NO: 1291 - DNA, 37 bp, Artificial Sequence
  Synthetic oligonucleotide
ttacttcgggagctaggctcacccctacattagtgga

SEQ ID NO: 1292 - DNA, 37 bp, Artificial Sequence
  Synthetic oligonucleotide
agtgcaattggatatatcagtgaggagtttcaattga

SEQ ID NO: 1293 - DNA, 37 bp, Artificial Sequence
  Synthetic oligonucleotide
ccgaaatcggggtagattatggggtcctggaaatcga

SEQ ID NO: 1294 - DNA, 38 bp, Artificial Sequence
  Synthetic oligonucleotide
taagtttgtagaatttaacgtatggaacggggacgtga

SEQ ID NO: 1295 - DNA, 35 bp, Artificial Sequence
  Synthetic oligonucleotide
tgagcgagcgcctgatattcggtactgcatatctc

SEQ ID NO: 1296 - DNA, 36 bp, Artificial Sequence
  Synthetic oligonucleotide
gatcgaattaggggaattcgttggaatcgacccata

SEQ ID NO: 1297 - DNA, 38 bp, Artificial Sequence
  Synthetic oligonucleotide
tctgtgcgaagggtttagtctcgggcgaaacttaatga

SEQ ID NO: 1298 - DNA, 38 bp, Artificial Sequence
  Synthetic oligonucleotide
agggaagtcctagttggagtgattttccgtgattctga

SEQ ID NO: 1299 - DNA, 38 bp, Artificial Sequence
  Synthetic oligonucleotide
aggaatggctagtctaagacaaactcctctgtttatga

SEQ ID NO: 1300 - DNA, 37 bp, Artificial Sequence
  Synthetic oligonucleotide
gattgtcacggatgattctggatttatataggtacga

SEQ ID NO: 1301 - DNA, 38 bp, Artificial Sequence
  Synthetic oligonucleotide
attcatgggagcttgaccggagttattgtttgttgtga

SEQ ID NO: 1302 - DNA, 35 bp, Artificial Sequence
  Synthetic oligonucleotide
tatcgaacttagatgtgacactgttttttagtcta

SEQ ID NO: 1303 - DNA, 37 bp, Artificial Sequence
  Synthetic oligonucleotide
agctacggcttatcgttggggtccaagttcatgaaga

SEQ ID NO: 1304 - DNA, 37 bp, Artificial Sequence
  Synthetic oligonucleotide
agtctaccccccaaattgttggtattccgagcataga

SEQ ID NO: 1305 - DNA, 35 bp, Artificial Sequence
  Synthetic oligonucleotide
tcgtcccaagctctggactggtaagttcttatgta

SEQ ID NO: 1306 - DNA, 36 bp, Artificial Sequence
  Synthetic oligonucleotide
tgctacagttcaacctcacgtttttgaactgcgtga

SEQ ID NO: 1307 - DNA, 37 bp, Artificial Sequence
  Synthetic oligonucleotide
cgtttggacgggggtgtccttttttttgatattacga

SEQ ID NO: 1308 - DNA, 37 bp, Artificial Sequence
  Synthetic oligonucleotide
ttcctcgtgttacaggcactttattagcctgtgggga

SEQ ID NO: 1309 - DNA, 36 bp, Artificial Sequence
  Synthetic oligonucleotide
cttggcccgttgaccacgacataatggtcttatata

SEQ ID NO: 1310 - DNA, 36 bp, Artificial Sequence
  Synthetic oligonucleotide
aggatatttaccctgcatcttttcgttacggtatga

SEQ ID NO: 1311 - DNA, 36 bp, Artificial Sequence
  Synthetic oligonucleotide
actgtctggaagtcggaactttcaccattatgatga

SEQ ID NO: 1312 - DNA, 38 bp, Artificial Sequence
  Synthetic oligonucleotide
gaatggaggaactttctcgtattcacgttttgttgtga

SEQ ID NO: 1313 - DNA, 38 bp, Artificial Sequence
  Synthetic oligonucleotide
aaccgttagtgcaaaggggagtacggcctttgttttga

SEQ ID NO: 1314 - DNA, 38 bp, Artificial Sequence
  Synthetic oligonucleotide
ctcgtacgcaaacgctttgaatagaacgtttgtcttga

SEQ ID NO: 1315 - DNA, 37 bp, Artificial Sequence
  Synthetic oligonucleotide
agatacccggtggttatcttaagggtgtgacttttga

SEQ ID NO: 1316 - DNA, 38 bp, Artificial Sequence
  Synthetic oligonucleotide
tagggttcagtatctggcgattctgttgatgttcctga

SEQ ID NO: 1317 - DNA, 38 bp, Artificial Sequence
  Synthetic oligonucleotide
cgagctcccttaagggtgcatcgggattcattgtttga

SEQ ID NO: 1318 - DNA, 38 bp, Artificial Sequence
  Synthetic oligonucleotide
cacatccggagaaggtgcgtttatacatgaatttctga

SEQ ID NO: 1319 - DNA, 38 bp, Artificial Sequence
  Synthetic oligonucleotide
aaggacgacgcggaacaatctgtagctatgactcttga

SEQ ID NO: 1320 - DNA, 37 bp, Artificial Sequence
  Synthetic oligonucleotide
acttgttcctgaagtgggtttgacttgcaaacgttga

SEQ ID NO: 1321 - DNA, 37 bp, Artificial Sequence
  Synthetic oligonucleotide
agtacacgcccgttggtttcgttcggaaattacttga

SEQ ID NO: 1322 - DNA, 37 bp, Artificial Sequence
  Synthetic oligonucleotide
tgaacatctttgttattcaacgggatcacgcaacgga

SEQ ID NO: 1323 - DNA, 36 bp, Artificial Sequence
  Synthetic oligonucleotide
taatccgatgcaatttgtatttactgacaatgcgta

SEQ ID NO: 1324 - DNA, 36 bp, Artificial Sequence
  Synthetic oligonucleotide
aactggaggatcccggaatttatcctcccatacgaa

SEQ ID NO: 1325 - DNA, 37 bp, Artificial Sequence
  Synthetic oligonucleotide
gaattgcggactgacagatagatgcggtgacattgga

SEQ ID NO: 1326 - DNA, 35 bp, Artificial Sequence
  Synthetic oligonucleotide
tcgcactagttctatgagggaaactacaggaacga

SEQ ID NO: 1327 - DNA, 37 bp, Artificial Sequence
  Synthetic oligonucleotide
gattgacctggaaggcaatagctggtcaacgactgga

SEQ ID NO: 1328 - DNA, 37 bp, Artificial Sequence
  Synthetic oligonucleotide
gcagtacggcacgagggatactctgccctatatatga

SEQ ID NO: 1329 - DNA, 37 bp, Artificial Sequence
  Synthetic oligonucleotide
gccatcatggatatatgcacgtatggtgcttttagga

SEQ ID NO: 1330 - DNA, 38 bp, Artificial Sequence
  Synthetic oligonucleotide
tgcgaaactctagatgattatgattaaacttgtactga

SEQ ID NO: 1331 - DNA, 37 bp, Artificial Sequence
  Synthetic oligonucleotide
aactgaccccattgggtcacccgtgatagttatcgga

SEQ ID NO: 1332 - DNA, 38 bp, Artificial Sequence
  Synthetic oligonucleotide
gtactgctctaggagaaaataaccgtatgaaacgatga

SEQ ID NO: 1333 - DNA, 38 bp, Artificial Sequence
  Synthetic oligonucleotide
ttgcgtatttgccttagaacgcaataaagcatttgtga

SEQ ID NO: 1334 - DNA, 38 bp, Artificial Sequence
  Synthetic oligonucleotide
atctacactggaactgacagggggtagtagtatcctga

SEQ ID NO: 1335 - DNA, 38 bp, Artificial Sequence
  Synthetic oligonucleotide
tagggattgaatctcctctaacattcgacaacaggtga

SEQ ID NO: 1336 - DNA, 38 bp, Artificial Sequence
  Synthetic oligonucleotide
agcgttcaacgcggttgagtgggtgccgaactatatga

SEQ ID NO: 1337 - DNA, 38 bp, Artificial Sequence
  Synthetic oligonucleotide
ggacctgatgccatttagtgtggataatgttattgtga

SEQ ID NO: 1338 - DNA, 35 bp, Artificial Sequence
  Synthetic oligonucleotide
tgatatctaggaaccatgcggtaatggtccgagta

SEQ ID NO: 1339 - DNA, 37 bp, Artificial Sequence
  Synthetic oligonucleotide
tgaaagccgtgactggtattaacggcaaataacggga

SEQ ID NO: 1340 - DNA, 36 bp, Artificial Sequence
  Synthetic oligonucleotide
tgcatgatacgggcttcaaggagcttcttattcgta

SEQ ID NO: 1341 - DNA, 37 bp, Artificial Sequence
  Synthetic oligonucleotide
agacacattgtgtgcaacatggaagtggtctttagga

SEQ ID NO: 1342 - DNA, 38 bp, Artificial Sequence
  Synthetic oligonucleotide
gagttgctctatgtacttcctgagggggtatgtgatga

SEQ ID NO: 1343 - DNA, 37 bp, Artificial Sequence
  Synthetic oligonucleotide
cctgttatctatacttgcgtgagcaaattactttaga

SEQ ID NO: 1344 - DNA, 38 bp, Artificial Sequence
  Synthetic oligonucleotide
tggagtacgcgtgcgttacagtccgaataaggctttga

SEQ ID NO: 1345 - DNA, 38 bp, Artificial Sequence
  Synthetic oligonucleotide
cacagtcaggcgtaatgagaatgagcactttggtttga

SEQ ID NO: 1346 - DNA, 36 bp, Artificial Sequence
  Synthetic oligonucleotide
tcatttacgtgagtaacctggcttagtatcggagta

SEQ ID NO: 1347 - DNA, 38 bp, Artificial Sequence
  Synthetic oligonucleotide
gatggaacgtagcgaaaccgggtttacgcgtgatctga

SEQ ID NO: 1348 - DNA, 37 bp, Artificial Sequence
  Synthetic oligonucleotide
taattatcgtcgtgagatcgatactacggttgtgcga

SEQ ID NO: 1349 - DNA, 35 bp, Artificial Sequence
  Synthetic oligonucleotide
gaggactggcattaccgtggtcagctaaactagac

SEQ ID NO: 1350 - DNA, 37 bp, Artificial Sequence
  Synthetic oligonucleotide
tgcagcatacctaattgttcaccgttgggaaaggtga

SEQ ID NO: 1351 - DNA, 36 bp, Artificial Sequence
  Synthetic oligonucleotide
agctttgtaatacgtgagtttgggtaggtcatcgta

SEQ ID NO: 1352 - DNA, 35 bp, Artificial Sequence
  Synthetic oligonucleotide
cctgcgtcctaaacggataacgaaaacgaatactc

SEQ ID NO: 1353 - DNA, 35 bp, Artificial Sequence
  Synthetic oligonucleotide
ccctgcacgaacgaaccggaataaatcgatggtga

SEQ ID NO: 1354 - DNA, 36 bp, Artificial Sequence
  Synthetic oligonucleotide
gcgcttttctcaaccgacgaccatcgaatagaagaa

SEQ ID NO: 1355 - DNA, 36 bp, Artificial Sequence
  Synthetic oligonucleotide
ttaggctaaggaacgggacccattcgatgaaaatca

SEQ ID NO: 1356 - DNA, 36 bp, Artificial Sequence
  Synthetic oligonucleotide
tcggagtttgcaatccggcaattattagattacaca

SEQ ID NO: 1357 - DNA, 35 bp, Artificial Sequence
  Synthetic oligonucleotide
accggaaatgaaccgtcgcttattccacgaattag

SEQ ID NO: 1358 - DNA, 35 bp, Artificial Sequence
  Synthetic oligonucleotide
gagaattgcggtaaatttcggggcaatatcctctc

SEQ ID NO: 1359 - DNA, 36 bp, Artificial Sequence
  Synthetic oligonucleotide
acgccccgaatgatcggtgggctgtattttacaata

SEQ ID NO: 1360 - DNA, 37 bp, Artificial Sequence
  Synthetic oligonucleotide
gagtagtgggctcacgggggcagtatatcggatacga

SEQ ID NO: 1361 - DNA, 36 bp, Artificial Sequence
  Synthetic oligonucleotide
gagtgcgatggcgtccacggggatttttcggaataa

SEQ ID NO: 1362 - DNA, 36 bp, Artificial Sequence
  Synthetic oligonucleotide
accacgtacaaggaagttaggattcggggaccgtga

SEQ ID NO: 1363 - DNA, 35 bp, Artificial Sequence
  Synthetic oligonucleotide
gaaagctcaagctaatgagaatacgatcatacacc

SEQ ID NO: 1364 - DNA, 36 bp, Artificial Sequence
  Synthetic oligonucleotide
aggacgacgaatttactctaggggtgggctggttaa

SEQ ID NO: 1365 - DNA, 37 bp, Artificial Sequence
  Synthetic oligonucleotide
gtacactggtgtgattgttgtggtggagttggtaaga

SEQ ID NO: 1366 - DNA, 36 bp, Artificial Sequence
  Synthetic oligonucleotide
gggtagtacggggagcactgggctagattgtgacta

SEQ ID NO: 1367 - DNA, 35 bp, Artificial Sequence
  Synthetic oligonucleotide
ggtggaacgggggttgggattgtaagggagtatgt

SEQ ID NO: 1368 - DNA, 37 bp, Artificial Sequence
  Synthetic oligonucleotide
acggtaaaaagggcaatgcttggcgtctatcagacga

SEQ ID NO: 1369 - DNA, 35 bp, Artificial Sequence
  Synthetic oligonucleotide
gtgtggaccggctagtaaaggctgttggggtaatt

SEQ ID NO: 1370 - DNA, 35 bp, Artificial Sequence
  Synthetic oligonucleotide
gcctatcggtggatagtttggtcattcattggagc

SEQ ID NO: 1371 - DNA, 37 bp, Artificial Sequence
  Synthetic oligonucleotide
actctccatgggtggggctcccgaaagaatttctaga

SEQ ID NO: 1372 - DNA, 37 bp, Artificial Sequence
  Synthetic oligonucleotide
ttaaagccatcaaaatctatctaaagttgtagaagga

SEQ ID NO: 1373 - DNA, 37 bp, Artificial Sequence
  Synthetic oligonucleotide
gtctacataatttgtatacggtttaaaatctcgagga

SEQ ID NO: 1374 - DNA, 38 bp, Artificial Sequence
  Synthetic oligonucleotide
tctcggagtagaatccaccagaatcacaggaattctga

SEQ ID NO: 1375 - DNA, 35 bp, Artificial Sequence
  Synthetic oligonucleotide
gaaaggtgccaatcgccggtacacaatttaggaaa

SEQ ID NO: 1376 - DNA, 35 bp, Artificial Sequence
  Synthetic oligonucleotide
cataaacaccttatgaatttatgtagaaatcgaaa

SEQ ID NO: 1377 - DNA, 34 bp, Artificial Sequence
  Synthetic oligonucleotide
gaaccgaagtagtagatttaattatacataatgt

SEQ ID NO: 1378 - DNA, 36 bp, Artificial Sequence
  Synthetic oligonucleotide
gccgcaatacaaacgagaggcttctcccgattaata

SEQ ID NO: 1379 - DNA, 35 bp, Artificial Sequence
  Synthetic oligonucleotide
acctgcggaatatcgtgagaattgaaaaaagcaaa

SEQ ID NO: 1380 - DNA, 38 bp, Artificial Sequence
  Synthetic oligonucleotide
taggcgaatcgaaaaaaagtaatcattatgggttgtga

SEQ ID NO: 1381 - DNA, 37 bp, Artificial Sequence
  Synthetic oligonucleotide
ataccggaccaaggacgccggggtactaaggactcga

SEQ ID NO: 1382 - DNA, 37 bp, Artificial Sequence
  Synthetic oligonucleotide
cgcataatagtcgacgtttttttttgtcggattcgga

SEQ ID NO: 1383 - DNA, 38 bp, Artificial Sequence
  Synthetic oligonucleotide
acaggaaggccaaagtttttccaaggtcgattgcctga

SEQ ID NO: 1384 - DNA, 36 bp, Artificial Sequence
  Synthetic oligonucleotide
gaaatcgtttggtaatttagttcggaacccagggta

SEQ ID NO: 1385 - DNA, 35 bp, Artificial Sequence
  Synthetic oligonucleotide
aaaacgtctcatgcggcctttcgagggcatatctc

SEQ ID NO: 1386 - DNA, 38 bp, Artificial Sequence
  Synthetic oligonucleotide
aaggttcgagaattctcactgcagatcatccgtcatga

SEQ ID NO: 1387 - DNA, 35 bp, Artificial Sequence
  Synthetic oligonucleotide
agtgctctctcttgggggtagtcatccagaatagt

SEQ ID NO: 1388 - DNA, 35 bp, Artificial Sequence
  Synthetic oligonucleotide
taagtcccaatttatttgaagacgttgtaatcgtc

SEQ ID NO: 1389 - DNA, 36 bp, Artificial Sequence
  Synthetic oligonucleotide
aaaacaggctaaaaaggtacatccccattttgctta

SEQ ID NO: 1390 - DNA, 37 bp, Artificial Sequence
  Synthetic oligonucleotide
gtgcgcaaggtttagcgcatacgtagttgaataccga

SEQ ID NO: 1391 - DNA, 37 bp, Artificial Sequence
  Synthetic oligonucleotide
ttccaagtacccaggtttagacctgggacgatagcga

SEQ ID NO: 1392 - DNA, 35 bp, Artificial Sequence
  Synthetic oligonucleotide
tttccaccaaccctgatttgaaaaagacacgcaaa

SEQ ID NO: 1393 - DNA, 35 bp, Artificial Sequence
  Synthetic oligonucleotide
ctccgcccaacgagagttctacgtaaagatcaaac

SEQ ID NO: 1394 - DNA, 37 bp, Artificial Sequence
  Synthetic oligonucleotide
tgtcccgcgcttgacatcatcctaagattaaagaaga

SEQ ID NO: 1395 - DNA, 35 bp, Artificial Sequence
  Synthetic oligonucleotide
attaccgttaatttaaagtacccacgggttgttgg

SEQ ID NO: 1396 - DNA, 37 bp, Artificial Sequence
  Synthetic oligonucleotide
gcatcgtggaaagattctcttataatcaattggggga

SEQ ID NO: 1397 - DNA, 35 bp, Artificial Sequence
  Synthetic oligonucleotide
acacacacggggtagatcacataggcaaacgcttg

SEQ ID NO: 1398 - DNA, 36 bp, Artificial Sequence
  Synthetic oligonucleotide
acaaacgtactaagggcgaagccttttactcgcgca

SEQ ID NO: 1399 - DNA, 38 bp, Artificial Sequence
  Synthetic oligonucleotide
cgtgcaaaccgctgtaagcattcaaaccaactggatga

SEQ ID NO: 1400 - DNA, 35 bp, Artificial Sequence
  Synthetic oligonucleotide
acacaaacacaatctaggagttaaatacagttgga

SEQ ID NO: 1401 - DNA, 35 bp, Artificial Sequence
  Synthetic oligonucleotide
actttcacgatgttgggggggcccaattacagatg

SEQ ID NO: 1402 - DNA, 35 bp, Artificial Sequence
  Synthetic oligonucleotide
acgtttagattaagttcgcttatgaatgtgggatt

SEQ ID NO: 1403 - DNA, 37 bp, Artificial Sequence
  Synthetic oligonucleotide
attgccgttgatgttcgtgattttattaagtggggga

SEQ ID NO: 1404 - DNA, 37 bp, Artificial Sequence
  Synthetic oligonucleotide
gttcttaggcctgttgttaccaggattttcgtgtaga

SEQ ID NO: 1405 - DNA, 36 bp, Artificial Sequence
  Synthetic oligonucleotide
agtccggatacctgtttgtatgcgaaagggaattta

SEQ ID NO: 1406 - DNA, 35 bp, Artificial Sequence
  Synthetic oligonucleotide
gttaatgtcaatctgaaccgacgtgagtattcggc

SEQ ID NO: 1407 - DNA, 37 bp, Artificial Sequence
  Synthetic oligonucleotide
accacggttgggttgcggctaacgtatagccgatgga

SEQ ID NO: 1408 - DNA, 36 bp, Artificial Sequence
  Synthetic oligonucleotide
gtgccttggttgtaattggactttatggctacctaa

SEQ ID NO: 1409 - DNA, 38 bp, Artificial Sequence
  Synthetic oligonucleotide
gatttgcgagtgtgaaacgaattatagcacacgtctga

SEQ ID NO: 1410 - DNA, 35 bp, Artificial Sequence
  Synthetic oligonucleotide
atgctggtgaaccaaactcaagcatgacatttaag

SEQ ID NO: 1411 - DNA, 36 bp, Artificial Sequence
  Synthetic oligonucleotide
cctgcccacgaattgtatatgtaattgcactatcga

SEQ ID NO: 1412 - DNA, 35 bp, Artificial Sequence
  Synthetic oligonucleotide
tctgcaggacttttgattcgtgggttcaacctcat

SEQ ID NO: 1413 - DNA, 37 bp, Artificial Sequence
  Synthetic oligonucleotide
gcacattatgtcacgtagaggcacagtcggtaatcga

SEQ ID NO: 1414 - DNA, 36 bp, Artificial Sequence
  Synthetic oligonucleotide
gggctacgttatcccattcaattcgaattaaatgta

SEQ ID NO: 1415 - DNA, 36 bp, Artificial Sequence
  Synthetic oligonucleotide
acattgccgaattaattcgttgtcgaggaaagacaa

SEQ ID NO: 1416 - DNA, 35 bp, Artificial Sequence
  Synthetic oligonucleotide
cccacgtgttacgggttttatcatgacatcactat

SEQ ID NO: 1417 - DNA, 35 bp, Artificial Sequence
  Synthetic oligonucleotide
catgcacgttttattgtggaaatgtaagcttgggc

SEQ ID NO: 1418 - DNA, 37 bp, Artificial Sequence
  Synthetic oligonucleotide
tgcaagggaaatacgttcctgtgttgtttcgatgaga

SEQ ID NO: 1419 - DNA, 35 bp, Artificial Sequence
  Synthetic oligonucleotide
tgggcagtctctatttgtcattacggttttatgtc

SEQ ID NO: 1420 - DNA, 38 bp, Artificial Sequence
  Synthetic oligonucleotide
agcaggcaacagtatcagccctatttgtcgtaaaatga

SEQ ID NO: 1421 - DNA, 38 bp, Artificial Sequence
  Synthetic oligonucleotide
ggctacgggaaagatgtcacgtctgtttcatttgatga

SEQ ID NO: 1422 - DNA, 35 bp, Artificial Sequence
  Synthetic oligonucleotide
actacgttttaatttcagtaacccatccgatgctc

SEQ ID NO: 1423 - DNA, 36 bp, Artificial Sequence
  Synthetic oligonucleotide
aacaaacgccaaccatatggtaggattcctctttta

SEQ ID NO: 1424 - DNA, 36 bp, Artificial Sequence
  Synthetic oligonucleotide
tgataaccatcggtacctcaccgctcccaactctta

SEQ ID NO: 1425 - DNA, 36 bp, Artificial Sequence
  Synthetic oligonucleotide
cgaaccgacgaaatttccacaccgctttgtatgtta

SEQ ID NO: 1426 - DNA, 35 bp, Artificial Sequence
  Synthetic oligonucleotide
tacctcatgtttgtcactatggaaatcatcccgac

SEQ ID NO: 1427 - DNA, 36 bp, Artificial Sequence
  Synthetic oligonucleotide
agttatttctcgccacataacactctatggaaacta

SEQ ID NO: 1428 - DNA, 36 bp, Artificial Sequence
  Synthetic oligonucleotide
atctcggatttcccgtaggtcactggcacatttcta

SEQ ID NO: 1429 - DNA, 37 bp, Artificial Sequence
  Synthetic oligonucleotide
aattttccgctgggacgaatttctaaccctatttgga

SEQ ID NO: 1430 - DNA, 35 bp, Artificial Sequence
  Synthetic oligonucleotide
gaagcaccgaatcacctggcatggccctttatcta

SEQ ID NO: 1431 - DNA, 35 bp, Artificial Sequence
  Synthetic oligonucleotide
actgccgacgcacaacttgggtggggctctaattt

SEQ ID NO: 1432 - DNA, 35 bp, Artificial Sequence
  Synthetic oligonucleotide
ttcgctgacctcaccggacatatcatttaaagcta

SEQ ID NO: 1433 - DNA, 35 bp, Artificial Sequence
  Synthetic oligonucleotide
tcccttattatgcgaaacaaatatgtagttcttac

SEQ ID NO: 1434 - DNA, 35 bp, Artificial Sequence
  Synthetic oligonucleotide
tctaaaactcacgctaggtggtacaaccgattcta

SEQ ID NO: 1435 - DNA, 36 bp, Artificial Sequence
  Synthetic oligonucleotide
gtagccaacgaagctcgcgtattctatttgccctta

SEQ ID NO: 1436 - DNA, 36 bp, Artificial Sequence
  Synthetic oligonucleotide
acctcaccaagtccttaaggattctgtattcataaa

SEQ ID NO: 1437 - DNA, 35 bp, Artificial Sequence
  Synthetic oligonucleotide
agaatctggctattgatccccacacattgcgaaaa

SEQ ID NO: 1438 - DNA, 35 bp, Artificial Sequence
  Synthetic oligonucleotide
acctaccaatctagatccgcttttatggattgctc

SEQ ID NO: 1439 - DNA, 35 bp, Artificial Sequence
  Synthetic oligonucleotide
gacttctaaacacatggggtgcccgcaacatattt

SEQ ID NO: 1440 - DNA, 38 bp, Artificial Sequence
  Synthetic oligonucleotide
tccagaacgtcagctctccatacgcaattaattcatga

SEQ ID NO: 1441 - DNA, 35 bp, Artificial Sequence
  Synthetic oligonucleotide
gacggccttataaggcactcctcattcatttaata

SEQ ID NO: 1442 - DNA, 38 bp, Artificial Sequence
  Synthetic oligonucleotide
gggacctgcaagcctatcaacgggttatacatttgtga

SEQ ID NO: 1443 - DNA, 36 bp, Artificial Sequence
  Synthetic oligonucleotide
tacacttccatttgatgcgctcaccttgaatctgta

SEQ ID NO: 1444 - DNA, 36 bp, Artificial Sequence
  Synthetic oligonucleotide
aatcgaactcattactttccaatggacctgggagaa

SEQ ID NO: 1445 - DNA, 36 bp, Artificial Sequence
  Synthetic oligonucleotide
agtttacgagttacactacaacggacgaatctttta

SEQ ID NO: 1446 - DNA, 35 bp, Artificial Sequence
  Synthetic oligonucleotide
aacttttctggctttatacacatacggttgccatt

SEQ ID NO: 1447 - DNA, 36 bp, Artificial Sequence
  Synthetic oligonucleotide
agaactgggccttggaatcacacacctaactagtta

SEQ ID NO: 1448 - DNA, 36 bp, Artificial Sequence
  Synthetic oligonucleotide
attcgcactaataacatgttgctccattcaacctaa

SEQ ID NO: 1449 - DNA, 35 bp, Artificial Sequence
  Synthetic oligonucleotide
tatctgctgttttctctggtgccaataactacatc

SEQ ID NO: 1450 - DNA, 37 bp, Artificial Sequence
  Synthetic oligonucleotide
ttgcacataattttctgctttaaccaagcgaacccga

SEQ ID NO: 1451 - DNA, 35 bp, Artificial Sequence
  Synthetic oligonucleotide
taaaattctgaaaatacacgtgtctttcgcattac

SEQ ID NO: 1452 - DNA, 35 bp, Artificial Sequence
  Synthetic oligonucleotide
tcccgaacacatcccccttttaagggctttgctaa

SEQ ID NO: 1453 - DNA, 38 bp, Artificial Sequence
  Synthetic oligonucleotide
aaccacacggggctctcatcgatacttctagtgattga

SEQ ID NO: 1454 - DNA, 35 bp, Artificial Sequence
  Synthetic oligonucleotide
atctagaattccgtttgcgcgagtaacttccctgt

SEQ ID NO: 1455 - DNA, 36 bp, Artificial Sequence
  Synthetic oligonucleotide
cccgcttatcgctagtacctcatttagaattggaaa

SEQ ID NO: 1456 - DNA, 36 bp, Artificial Sequence
  Synthetic oligonucleotide
acctgtaaatttggctcacttttcctttacactgga

SEQ ID NO: 1457 - DNA, 35 bp, Artificial Sequence
  Synthetic oligonucleotide
aatagtatcacacctatctggcttcctgtacccgt

SEQ ID NO: 1458 - DNA, 38 bp, Artificial Sequence
  Synthetic oligonucleotide
acccacccttgagcaccattaaatagtgatttcgctga

SEQ ID NO: 1459 - DNA, 37 bp, Artificial Sequence
  Synthetic oligonucleotide
tcacgaaccctttagctctattttgtttgacgcatga

SEQ ID NO: 1460 - DNA, 37 bp, Artificial Sequence
  Synthetic oligonucleotide
gaggaacgtttctcccctcaacatttaaataaacaga

SEQ ID NO: 1461 - DNA, 35 bp, Artificial Sequence
  Synthetic oligonucleotide
atcctacgcataattctcgaggatctatttcgaaa

SEQ ID NO: 1462 - DNA, 36 bp, Artificial Sequence
  Synthetic oligonucleotide
tgcccgcaattacccctagatccacagcttggttta

SEQ ID NO: 1463 - DNA, 38 bp, Artificial Sequence
  Synthetic oligonucleotide
ggctcttatacaaaacattgggttctcgacctccctga

SEQ ID NO: 1464 - DNA, 36 bp, Artificial Sequence
  Synthetic oligonucleotide
gtgagctgctaatatttatcctgaacttgcttacga

SEQ ID NO: 1465 - DNA, 35 bp, Artificial Sequence
  Synthetic oligonucleotide
agttaccttacaacgaggtttcttgaatggattct

SEQ ID NO: 1466 - DNA, 35 bp, Artificial Sequence
  Synthetic oligonucleotide
ttacaccatccctacgcggtaatagcaactctgtt

SEQ ID NO: 1467 - DNA, 36 bp, Artificial Sequence
  Synthetic oligonucleotide
gcaccacgcacctgtggggattccctaatgtcttta

SEQ ID NO: 1468 - DNA, 35 bp, Artificial Sequence
  Synthetic oligonucleotide
ctatcggactaatacacgtaaaaataactctggtt

SEQ ID NO: 1469 - DNA, 35 bp, Artificial Sequence
  Synthetic oligonucleotide
ggcgtacttatcacaaacggtggaaccacacttct

SEQ ID NO: 1470 - DNA, 37 bp, Artificial Sequence
  Synthetic oligonucleotide
tattcttatccaacccacgaaatcaattgtattttga

SEQ ID NO: 1471 - DNA, 35 bp, Artificial Sequence
  Synthetic oligonucleotide
agatccgaatccgtaactccaaaatatttatgcac

SEQ ID NO: 1472 - DNA, 38 bp, Artificial Sequence
  Synthetic oligonucleotide
actatagaacaatccaccgctttaaatcaactatctta

SEQ ID NO: 1473 - DNA, 35 bp, Artificial Sequence
  Synthetic oligonucleotide
gccgttcttctgcgacgaacacatcctcccttaat

SEQ ID NO: 1474 - DNA, 35 bp, Artificial Sequence
  Synthetic oligonucleotide
gcgcgaggcccgcgggctcatcacttttgttatct

SEQ ID NO: 1475 - DNA, 38 bp, Artificial Sequence
  Synthetic oligonucleotide
tacccctgacaatcctcgcgccgaggcctccatcctga

SEQ ID NO: 1476 - DNA, 36 bp, Artificial Sequence
  Synthetic oligonucleotide
ttcggtctaatttttagcggccaaattttcttatca

SEQ ID NO: 1477 - DNA, 36 bp, Artificial Sequence
  Synthetic oligonucleotide
gattttaaaacccttgcacctgattgtgccaatcca

SEQ ID NO: 1478 - DNA, 35 bp, Artificial Sequence
  Synthetic oligonucleotide
gcgcgaggcccgcgggctcatcacttttgttatat

SEQ ID NO: 1479 - DNA, 35 bp, Artificial Sequence
  Synthetic oligonucleotide
gccgttcttctgcgacgaacacatcctcccttact

SEQ ID NO: 1480 - DNA, 36 bp, Artificial Sequence
  Synthetic oligonucleotide
tgctcggccctattaacacgtgccgtgtcttgttca

SEQ ID NO: 1481 - DNA, 38 bp, Artificial Sequence
  Synthetic oligonucleotide
tcgcgccgaccgtattacaccaactctatggactctaa

SEQ ID NO: 1482 - DNA, 36 bp, Artificial Sequence
  Synthetic oligonucleotide
aacccaattcacatacactctcacccccactaaaca

SEQ ID NO: 1483 - DNA, 35 bp, Artificial Sequence
  Synthetic oligonucleotide
gccgttcttctgcgacgaacacatcctcccttatt

SEQ ID NO: 1484 - DNA, 35 bp, Artificial Sequence
  Synthetic oligonucleotide
gcgcgaggcccgcgggctcatcacttttgttatgt

SEQ ID NO: 1485 - DNA, 38 bp, Artificial Sequence
  Synthetic oligonucleotide
tacccctgacaatcctcgcgccgaggcctccatcctca

SEQ ID NO: 1486 - DNA, 36 bp, Artificial Sequence
  Synthetic oligonucleotide
ttccgcgcaaacgaatgactctttgttgaaaaacga

SEQ ID NO: 1487 - DNA, 36 bp, Artificial Sequence
  Synthetic oligonucleotide
gcgtagtggctgcttggcgtttccgcatactaggca

SEQ ID NO: 1488 - DNA, 37 bp, Artificial Sequence
  Synthetic oligonucleotide
aaacctcggctaaccgccaagggtagtgtcccccgca

SEQ ID NO: 1489 - DNA, 38 bp, Artificial Sequence
  Synthetic oligonucleotide
atgagacgtagcaacactcgagacccttggagcactca

SEQ ID NO: 1490 - DNA, 36 bp, Artificial Sequence
  Synthetic oligonucleotide
agctgccagggttcgggaccttaacggatgtcccaa

SEQ ID NO: 1491 - DNA, 37 bp, Artificial Sequence
  Synthetic oligonucleotide
tcacgagcttccactacgtctatccgcgtagacggaa

SEQ ID NO: 1492 - DNA, 37 bp, Artificial Sequence
  Synthetic oligonucleotide
gatcgacgattcgatcatccaacgtatttacaccaga

SEQ ID NO: 1493 - DNA, 36 bp, Artificial Sequence
  Synthetic oligonucleotide
gcagccggcgaccgggatgtcgtcgggacttgctta

SEQ ID NO: 1494 - DNA, 38 bp, Artificial Sequence
  Synthetic oligonucleotide
atgaaccatggttacacctctaatgtagcctcatgtca

SEQ ID NO: 1495 - DNA, 37 bp, Artificial Sequence
  Synthetic oligonucleotide
ccaccggtacttattattcgccatccacacccagtta

SEQ ID NO: 1496 - DNA, 35 bp, Artificial Sequence
  Synthetic oligonucleotide
tagttacgccactactctgtgggagaaacccgaga

SEQ ID NO: 1497 - DNA, 38 bp, Artificial Sequence
  Synthetic oligonucleotide
atccacccaaaatcgatataagtgcgcccccaatctaa

SEQ ID NO: 1498 - DNA, 35 bp, Artificial Sequence
  Synthetic oligonucleotide
aggggggaaagtcatcgggtggctgtactacttca

SEQ ID NO: 1499 - DNA, 37 bp, Artificial Sequence
  Synthetic oligonucleotide
gggggtcgtactcccgagatttgcgttacggtgaaca

SEQ ID NO: 1500 - DNA, 37 bp, Artificial Sequence
  Synthetic oligonucleotide
gagtatcctctggtcgttcggtacagaaacggtgtaa

SEQ ID NO: 1501 - DNA, 37 bp, Artificial Sequence
  Synthetic oligonucleotide
acatggcctttaaatctacggagtactgttgggggga

SEQ ID NO: 1502 - DNA, 36 bp, Artificial Sequence
  Synthetic oligonucleotide
gcgtagtggctgcttggcgtttccgcatactaggaa

SEQ ID NO: 1503 - DNA, 36 bp, Artificial Sequence
  Synthetic oligonucleotide
tccgataccgaacttcactccgtgggcggggttgaa

SEQ ID NO: 1504 - DNA, 38 bp, Artificial Sequence
  Synthetic oligonucleotide
gcagtgttatttctcttggtttctttgatttcacttaa

SEQ ID NO: 1505 - DNA, 38 bp, Artificial Sequence
  Synthetic oligonucleotide
acatccagatacccttgacttaagattgtgaccactaa

SEQ ID NO: 1506 - DNA, 37 bp, Artificial Sequence
  Synthetic oligonucleotide
acaggttctgcgaccagaaagttaggactaacctaga

SEQ ID NO: 1507 - DNA, 38 bp, Artificial Sequence
  Synthetic oligonucleotide
gcagtgttatttctcttggtttctttgatttcacttca

SEQ ID NO: 1508 - DNA, 37 bp, Artificial Sequence
  Synthetic oligonucleotide
ccgcagttttgttcccgggggaatccggactgaacga

SEQ ID NO: 1509 - DNA, 37 bp, Artificial Sequence
  Synthetic oligonucleotide
aggtccggttcctatggactgcctgaccccgcgaaga

SEQ ID NO: 1510 - DNA, 35 bp, Artificial Sequence
  Synthetic oligonucleotide
ttgtaacgatttgggagtccagagactcgctgttt

SEQ ID NO: 1511 - DNA, 37 bp, Artificial Sequence
  Synthetic oligonucleotide
tttgatttaagtactcccgcgttcctccgaataccca

SEQ ID NO: 1512 - DNA, 38 bp, Artificial Sequence
  Synthetic oligonucleotide
gcagagcgcacgtgtactcaatgggttgttaattttaa

SEQ ID NO: 1513 - DNA, 36 bp, Artificial Sequence
  Synthetic oligonucleotide
gaactctgtattattcctgtcattagccgttggtaa

SEQ ID NO: 1514 - DNA, 38 bp, Artificial Sequence
  Synthetic oligonucleotide
gaggccctaccgtgtattttgataatggatttgtttaa

SEQ ID NO: 1515 - DNA, 38 bp, Artificial Sequence
  Synthetic oligonucleotide
tgtaatcacgggtgcgaactcgagagaatttgtgctaa

SEQ ID NO: 1516 - DNA, 38 bp, Artificial Sequence
  Synthetic oligonucleotide
ggccggtagtccacgctttcgcgagatagtgactgtga

SEQ ID NO: 1517 - DNA, 36 bp, Artificial Sequence
  Synthetic oligonucleotide
aggtcctcagaacttgtgcgtgagcaaagaatgaag

SEQ ID NO: 1518 - DNA, 38 bp, Artificial Sequence
  Synthetic oligonucleotide
gagtatctgggttcgagagcgcatttgcccgctgttga

SEQ ID NO: 1519 - DNA, 35 bp, Artificial Sequence
  Synthetic oligonucleotide
gtattaatcttcgctgtgggagagcgattacgcca

SEQ ID NO: 1520 - DNA, 36 bp, Artificial Sequence
  Synthetic oligonucleotide
tatccttggatcaccgatcgatgcgagaggtagtaa

SEQ ID NO: 1521 - DNA, 38 bp, Artificial Sequence
  Synthetic oligonucleotide
ttttctacgtgacggagagtccagatcgaagacaaaga

SEQ ID NO: 1522 - DNA, 36 bp, Artificial Sequence
  Synthetic oligonucleotide
acaatgcatcgtagcgggtctcggagctcgccttaa

SEQ ID NO: 1523 - DNA, 37 bp, Artificial Sequence
  Synthetic oligonucleotide
tacaaagaacggaagctattcaaaaacacacggagga

SEQ ID NO: 1524 - DNA, 35 bp, Artificial Sequence
  Synthetic oligonucleotide
ggacgaccggatatagtaaagtccccggcttctgt

SEQ ID NO: 1525 - DNA, 37 bp, Artificial Sequence
  Synthetic oligonucleotide
agccatcatgttggcacggtcctttgataccattgga

SEQ ID NO: 1526 - DNA, 36 bp, Artificial Sequence
  Synthetic oligonucleotide
attaccgtcaacgggtcctgggctccatacgaggca

SEQ ID NO: 1527 - DNA, 35 bp, Artificial Sequence
  Synthetic oligonucleotide
ctgctttaggtgtggtcgcactcaaatgtgaatgg

SEQ ID NO: 1528 - DNA, 36 bp, Artificial Sequence
  Synthetic oligonucleotide
gcggggtaagaactcgatgaggtgagtggatttgta

SEQ ID NO: 1529 - DNA, 35 bp, Artificial Sequence
  Synthetic oligonucleotide
aagggattggaacttggatgttttcagttggcgca

SEQ ID NO: 1530 - DNA, 38 bp, Artificial Sequence
  Synthetic oligonucleotide
tgcctcggctagcatcacaatagatggtttgcacttga

SEQ ID NO: 1531 - DNA, 38 bp, Artificial Sequence
  Synthetic oligonucleotide
gagacgaaggcaccttttcgacgcgataagctcgttga

SEQ ID NO: 1532 - DNA, 36 bp, Artificial Sequence
  Synthetic oligonucleotide
accgcgaggtcttttggaacagggcatatgaatcca

SEQ ID NO: 1533 - DNA, 37 bp, Artificial Sequence
  Synthetic oligonucleotide
acgtgaaactaccgagcggtgcttttcgctgtagcga

SEQ ID NO: 1534 - DNA, 37 bp, Artificial Sequence
  Synthetic oligonucleotide
caacgcctgactactgtagagtgaacgctggtggtga

SEQ ID NO: 1535 - DNA, 38 bp, Artificial Sequence
  Synthetic oligonucleotide
gcgaaggtttgggtaaaaggaaatagactttgttgtga

SEQ ID NO: 1536 - DNA, 36 bp, Artificial Sequence
  Synthetic oligonucleotide
acaagtcgctgctcagcttcctagggcagtactcaa

SEQ ID NO: 1537 - DNA, 36 bp, Artificial Sequence
  Synthetic oligonucleotide
aaacgggatctgtcgcgagtacagtgttgcccagta

SEQ ID NO: 1538 - DNA, 36 bp, Artificial Sequence
  Synthetic oligonucleotide
taaaggaacagcgattcgggctgttattttaggtga

SEQ ID NO: 1539 - DNA, 36 bp, Artificial Sequence
  Synthetic oligonucleotide
tgtgggattattgtagttgtagtaaggtgaccggca

SEQ ID NO: 1540 - DNA, 36 bp, Artificial Sequence
  Synthetic oligonucleotide
cgctaaccggaactaggttgcaaagctatggtggta

SEQ ID NO: 1541 - DNA, 36 bp, Artificial Sequence
  Synthetic oligonucleotide
cccttaggttccagtgaagttatgcaacttcatgta

SEQ ID NO: 1542 - DNA, 37 bp, Artificial Sequence
  Synthetic oligonucleotide
ctattccagcttttttgatcccgcttttgagagttga

SEQ ID NO: 1543 - DNA, 38 bp, Artificial Sequence
  Synthetic oligonucleotide
acaggacgtgcgcgctaacgttctattagttgtgctga

SEQ ID NO: 1544 - DNA, 36 bp, Artificial Sequence
  Synthetic oligonucleotide
gagtttcgttttatgtgttggctttatttccctcga

SEQ ID NO: 1545 - DNA, 36 bp, Artificial Sequence
  Synthetic oligonucleotide
tggcgttgtagccacgtccctccgctagtagagaaa

SEQ ID NO: 1546 - DNA, 35 bp, Artificial Sequence
  Synthetic oligonucleotide
tcgtagtactggtcttaatttgttgtagtcctaag

SEQ ID NO: 1547 - DNA, 36 bp, Artificial Sequence
  Synthetic oligonucleotide
tccacacgcggcgagctacgcgactaaaatcacgta

SEQ ID NO: 1548 - DNA, 38 bp, Artificial Sequence
  Synthetic oligonucleotide
tatcaaattcggtcgtagtatttgtcgccgtaacgtga

SEQ ID NO: 1549 - DNA, 36 bp, Artificial Sequence
  Synthetic oligonucleotide
gctacgaagtccaaacgtacgcacctgtttggagta

SEQ ID NO: 1550 - DNA, 35 bp, Artificial Sequence
  Synthetic oligonucleotide
tccgggcaccatatctccactgtgcgaatcactat

SEQ ID NO: 1551 - DNA, 35 bp, Artificial Sequence
  Synthetic oligonucleotide
tccgggcaccatatctccactgtgcgaatcactct

SEQ ID NO: 1552 - DNA, 38 bp, Artificial Sequence; identical to SEQ ID NO: 1543
  Synthetic oligonucleotide

SEQ ID NO: 1553 - DNA, 36 bp, Artificial Sequence
  Synthetic oligonucleotide
agcaaacgatgggccatcattcacgcttggtattaa

SEQ ID NO: 1554 - DNA, 38 bp, Artificial Sequence
  Synthetic oligonucleotide
agggacgtgatatttcaatgctgaatatacacacctga

SEQ ID NO: 1555 - DNA, 37 bp, Artificial Sequence
  Synthetic oligonucleotide
agtgattctcacttgttcccggggttcaaagatctga

SEQ ID NO: 1556 - DNA, 36 bp, Artificial Sequence
  Synthetic oligonucleotide
atcaagggaggatttttcggtcggcctagggacaca

SEQ ID NO: 1557 - DNA, 35 bp, Artificial Sequence
  Synthetic oligonucleotide
atacgcggcctaataataagatcgtcataccccaa

SEQ ID NO: 1558 - DNA, 35 bp, Artificial Sequence
  Synthetic oligonucleotide
atctcacgataaagctaacggtgagagtatctact

SEQ ID NO: 1559 - DNA, 37 bp, Artificial Sequence
  Synthetic oligonucleotide
ccgccggcgatgggggatcgcttattttattgttcga

SEQ ID NO: 1560 - DNA, 36 bp, Artificial Sequence
  Synthetic oligonucleotide
cgggtacgttggatcgacaccgaccatcttgacgta

SEQ ID NO: 1561 - DNA, 36 bp, Artificial Sequence; identical to SEQ ID NO: 1540
  Synthetic oligonucleotide

SEQ ID NO: 1562 - DNA, 38 bp, Artificial Sequence
  Synthetic oligonucleotide
cgagtgctgcgcgggttccttggggtgctccaatttga

SEQ ID NO: 1563 - DNA, 35 bp, Artificial Sequence
  Synthetic oligonucleotide
cgtgtaacccgcccaattccatcgtcacgaaattt

SEQ ID NO: 1564 - DNA, 37 bp, Artificial Sequence; identical to SEQ ID NO: 1542
  Synthetic oligonucleotide

SEQ ID NO: 1565 - DNA, 38 bp, Artificial Sequence
  Synthetic oligonucleotide
cctcgaacctgcgcgggagaaggcgcttgctaatctga

SEQ ID NO: 1566 - DNA, 38 bp, Artificial Sequence
  Synthetic oligonucleotide
cttggtccctgctcggttgaatgacgcaatgagtgtga

SEQ ID NO: 1567 - DNA, 38 bp, Artificial Sequence
  Synthetic oligonucleotide
ctcgtaggactgaggtcgatagttatttcacaccgtga

SEQ ID NO: 1568 - DNA, 38 bp, Artificial Sequence
  Synthetic oligonucleotide
gacacgacgtatctccttattccctgctataagtttga

SEQ ID NO: 1569 - DNA, 36 bp, Artificial Sequence
  Synthetic oligonucleotide
gacgttcttgcaccgcgaggtctgcagcaattctaa

SEQ ID NO: 1570 - DNA, 35 bp, Artificial Sequence
  Synthetic oligonucleotide
gcaactattgggccgtattcgtccacggggcttgt

SEQ ID NO: 1571 - DNA, 38 bp, Artificial Sequence
  Synthetic oligonucleotide
gcgtagggttggttatgcatcaattttccgctaattga

SEQ ID NO: 1572 - DNA, 36 bp, Artificial Sequence
  Synthetic oligonucleotide
gccttcggggtttattaagttattacggatctagta

SEQ ID NO: 1573 - DNA, 37 bp, Artificial Sequence
  Synthetic oligonucleotide
gcgcgtgagctgcaccgacatcacgccgattctctga

SEQ ID NO: 1574 - DNA, 36 bp, Artificial Sequence; identical to SEQ ID NO: 1549
  Synthetic oligonucleotide

SEQ ID NO: 1575 - DNA, 36 bp, Artificial Sequence
  Synthetic oligonucleotide
ggtcactcgtaggtctcccgcatcgagaaagccgta

SEQ ID NO: 1576 - DNA, 38 bp, Artificial Sequence
  Synthetic oligonucleotide
gtggatggcactaatatccccttctcgttaaagtgtga

SEQ ID NO: 1577 - DNA, 35 bp, Artificial Sequence
  Synthetic oligonucleotide
gtccaccgggattcgtatgggtatttttacccacc

SEQ ID NO: 1578 - DNA, 38 bp, Artificial Sequence
  Synthetic oligonucleotide
gttacggtatgcgaggtctcacgttgcgatcattttga

SEQ ID NO: 1579 - DNA, 37 bp, Artificial Sequence
  Synthetic oligonucleotide
gttcatcgttcctatgtcactatttccctactgctga

SEQ ID NO: 1580 - DNA, 37 bp, Artificial Sequence
  Synthetic oligonucleotide
tactaggggccgtgagccttgtgccccaagtagccga

SEQ ID NO: 1581 - DNA, 38 bp, Artificial Sequence; identical to SEQ ID NO: 1548
  Synthetic oligonucleotide

SEQ ID NO: 1582 - DNA, 36 bp, Artificial Sequence; identical to SEQ ID NO: 1547
  Synthetic oligonucleotide

SEQ ID NO: 1583 - DNA, 35 bp, Artificial Sequence; identical to SEQ ID NO: 1546
  Synthetic oligonucleotide

SEQ ID NO: 1584 - DNA, 37 bp, Artificial Sequence
  Synthetic oligonucleotide
tcgtgcgctcggttctacgccactgtacgagacacga

SEQ ID NO: 1585 - DNA, 35 bp, Artificial Sequence
  Synthetic oligonucleotide
tgtacgaaccgggcctaggatagttgctacatgta

SEQ ID NO: 1586 - DNA, 36 bp, Artificial Sequence
  Synthetic oligonucleotide
ataatgccagatctttggtttatcttgcgcttggta

SEQ ID NO: 1587 - DNA, 37 bp, Artificial Sequence
  Synthetic oligonucleotide
ccattagctgagtttcggtggacgcatgatagtttga

SEQ ID NO: 1588 - DNA, 35 bp, Artificial Sequence
  Synthetic oligonucleotide
actccatgggccccccggtttggaccccgggttta

SEQ ID NO: 1589 - DNA, 36 bp, Artificial Sequence
  Synthetic oligonucleotide
gaaaatctggcgacttagttttcgtttgatccctta

SEQ ID NO: 1590 - DNA, 36 bp, Artificial Sequence
  Synthetic oligonucleotide
agctcatggacgcactggtggcagtgcgactactaa

SEQ ID NO: 1591 - DNA, 35 bp, Artificial Sequence
  Synthetic oligonucleotide
aggataactggtttttatctctgctaattcactcg

SEQ ID NO: 1592 - DNA, 38 bp, Artificial Sequence
  Synthetic oligonucleotide
cgtggcctgtttggagacgtactgtgtcaggcatttga

SEQ ID NO: 1593 - DNA, 36 bp, Artificial Sequence
  Synthetic oligonucleotide
accttgggatcctgtttagaccgaatcggtgcgcta

SEQ ID NO: 1594 - DNA, 35 bp, Artificial Sequence
  Synthetic oligonucleotide
atcgtagtcatagacccggctttggtttccgggta

SEQ ID NO: 1595 - DNA, 37 bp, Artificial Sequence
  Synthetic oligonucleotide
gacctgggctgtctttactttgtttcgcggggctgga

SEQ ID NO: 1596 - DNA, 38 bp, Artificial Sequence
  Synthetic oligonucleotide
ccttgagccgccgggtttcggtccttattcgtgaatga

SEQ ID NO: 1597 - DNA, 35 bp, Artificial Sequence
  Synthetic oligonucleotide
agatcttttcggttattggggggaaccgagacgta

SEQ ID NO: 1598 - DNA, 36 bp, Artificial Sequence
  Synthetic oligonucleotide
gtgcgttggttaccgatggaggggacccgtagacta

SEQ ID NO: 1599 - DNA, 35 bp, Artificial Sequence
  Synthetic oligonucleotide
ttttattggctcgtttcctataatatgttgaatcc

SEQ ID NO: 1600 - DNA, 35 bp, Artificial Sequence
  Synthetic oligonucleotide
gcctcgacgacagtgacctacatcgctcgtttcgt

SEQ ID NO: 1601 - DNA, 38 bp, Artificial Sequence
  Synthetic oligonucleotide
ggtctggggggattcctacggttccaacagcataatga

SEQ ID NO: 1602 - DNA, 36 bp, Artificial Sequence
  Synthetic oligonucleotide
gttgccttgtaccccatagctggtaaggtcctagta

SEQ ID NO: 1603 - DNA, 36 bp, Artificial Sequence
  Synthetic oligonucleotide
gttgttcgggcgtcgcaacacggtcccattgtctta

SEQ ID NO: 1604 - DNA, 36 bp, Artificial Sequence
  Synthetic oligonucleotide
tcgttatagcctatatacacgcggttgactcgctga

SEQ ID NO: 1605 - DNA, 35 bp, Artificial Sequence
  Synthetic oligonucleotide
ttgtagctgctattgttttctcgattgagaactta

SEQ ID NO: 1606 - DNA, 35 bp, Artificial Sequence
  Synthetic oligonucleotide
ggctcttggtttagcccttattgtttatcattcat

SEQ ID NO: 1607 - DNA, 35 bp, Artificial Sequence
  Synthetic oligonucleotide
taattggcccgtttccaaatttatagattcctaca

SEQ ID NO: 1608 - DNA, 38 bp, Artificial Sequence
  Synthetic oligonucleotide
tccgacccatatcgacgatactggcgtggcgctactga

SEQ ID NO: 1609 - DNA, 38 bp, Artificial Sequence
  Synthetic oligonucleotide
tgcgtgagtaacgcacaggggaacactccgttttgtga

SEQ ID NO: 1610 - DNA, 36 bp, Artificial Sequence
  Synthetic oligonucleotide
gctggtatagctgggtttctatcgtttattctcgta

SEQ ID NO: 1611 - DNA, 36 bp, Artificial Sequence
  Synthetic oligonucleotide
tttgcttcatttgcacttcccccgttattccgctca

SEQ ID NO: 1612 - DNA, 38 bp, Artificial Sequence
  Synthetic oligonucleotide
aatttttactgcgtggaaaggattcgggaatttgttga

SEQ ID NO: 1613 - DNA, 36 bp, Artificial Sequence; identical to SEQ ID NO: 1593
  Synthetic oligonucleotide

SEQ ID NO: 1614 - DNA, 35 bp, Artificial Sequence; identical to SEQ ID NO: 1591
  Synthetic oligonucleotide

SEQ ID NO: 1615 - DNA, 36 bp, Artificial Sequence; identical to SEQ ID NO: 1590
  Synthetic oligonucleotide

SEQ ID NO: 1616 - DNA, 36 bp, Artificial Sequence
  Synthetic oligonucleotide
aggagtacgcgttcatccagacacggaatactttga

SEQ ID NO: 1617 - DNA, 36 bp, Artificial Sequence
  Synthetic oligonucleotide
agccttacgccatgccgagagagcgctttgtttcga

SEQ ID NO: 1618 - DNA, 35 bp, Artificial Sequence
  Synthetic oligonucleotide
agggcttagtttcctgattttactacagctcgctc

SEQ ID NO: 1619 - DNA, 36 bp, Artificial Sequence; identical to SEQ ID NO: 1586
  Synthetic oligonucleotide

SEQ ID NO: 1620 - DNA, 35 bp, Artificial Sequence
  Synthetic oligonucleotide
agtcctgatgctcaatgcgcgagtttcattgagct

SEQ ID NO: 1621 - DNA, 35 bp, Artificial Sequence; identical to SEQ ID NO: 1594
  Synthetic oligonucleotide

SEQ ID NO: 1622 - DNA, 37 bp, Artificial Sequence; identical to SEQ ID NO: 1587
  Synthetic oligonucleotide

SEQ ID NO: 1623 - DNA, 35 bp, Artificial Sequence
  Synthetic oligonucleotide
cgtaagccggtttcagcccacctggagattcttca

SEQ ID NO: 1624 - DNA, 38 bp, Artificial Sequence; identical to SEQ ID NO: 1596
  Synthetic oligonucleotide

SEQ ID NO: 1625 - DNA, 36 bp, Artificial Sequence
  Synthetic oligonucleotide
cgtagttactcgtcatggggtctttgttatgtggta

SEQ ID NO: 1626 - DNA, 36 bp, Artificial Sequence; identical to SEQ ID NO: 1589
  Synthetic oligonucleotide

SEQ ID NO: 1627 - DNA, 37 bp, Artificial Sequence; identical to SEQ ID NO: 1595
  Synthetic oligonucleotide

SEQ ID NO: 1628 - DNA, 37 bp, Artificial Sequence
  Synthetic oligonucleotide
gagtccccttctttgatgctggggtgagctcctccga

SEQ ID NO: 1629 - DNA, 37 bp, Artificial Sequence
  Synthetic oligonucleotide
gatgatcgcgcctttcgtttgtgacggttaccaggga

SEQ ID NO: 1630 - DNA, 35 bp, Artificial Sequence; identical to SEQ ID NO: 1600
  Synthetic oligonucleotide

SEQ ID NO: 1631 - DNA, 38 bp, Artificial Sequence
  Synthetic oligonucleotide
ggcccccgctccctagtttgagcgccctccacgattga

SEQ ID NO: 1632 - DNA, 35 bp, Artificial Sequence; identical to SEQ ID NO: 1606
  Synthetic oligonucleotide

SEQ ID NO: 1633 - DNA, 38 bp, Artificial Sequence; identical to SEQ ID NO: 1601
  Synthetic oligonucleotide

SEQ ID NO: 1634 - DNA, 36 bp, Artificial Sequence; identical to SEQ ID NO: 1602
  Synthetic oligonucleotide

SEQ ID NO: 1635 - DNA, 36 bp, Artificial Sequence; identical to SEQ ID NO: 1603
  Synthetic oligonucleotide

SEQ ID NO: 1636 - DNA, 38 bp, Artificial Sequence
  Synthetic oligonucleotide
tactggggaagctccgggcgcttggtttcgccacctga

SEQ ID NO: 1637 - DNA, 35 bp, Artificial Sequence
  Synthetic oligonucleotide
tcatttcggactgttctaacgcgagttatgaaggg

SEQ ID NO: 1638 - DNA, 36 bp, Artificial Sequence
  Synthetic oligonucleotide
tcacccgacggcaacaagggcatttgcttcatagta

SEQ ID NO: 1639 - DNA, 37 bp, Artificial Sequence
  Synthetic oligonucleotide
tcgaggggaattgtccacatgcatggtttcataagga

SEQ ID NO: 1640 - DNA, 38 bp, Artificial Sequence; identical to SEQ ID NO: 1608
  Synthetic oligonucleotide

SEQ ID NO: 1641 - DNA, 38 bp, Artificial Sequence; identical to SEQ ID NO: 1609
  Synthetic oligonucleotide

SEQ ID NO: 1642 - DNA, 38 bp, Artificial Sequence
  Synthetic oligonucleotide
tgttcttactaggcttagcagcctgttcccgttattga

SEQ ID NO: 1643 - DNA, 37 bp, Artificial Sequence
  Synthetic oligonucleotide
tgttttcagaccagagtaggaattccgagggcggtta

SEQ ID NO: 1644 - DNA, 35 bp, Artificial Sequence
  Synthetic oligonucleotide
tgttttgctgcttagagcgtaatcgtattggctct

SEQ ID NO: 1645 - DNA, 37 bp, Artificial Sequence
  Synthetic oligonucleotide
ttcctaggatgaaacagaaacaccgattggtccagga

SEQ ID NO: 1646 - DNA, 37 bp, Artificial Sequence
  Synthetic oligonucleotide
ttccggttttgggcgactccgtttgcgcccacgctga

SEQ ID NO: 1647 - DNA, 35 bp, Artificial Sequence
  Synthetic oligonucleotide
tttgcaagttcgctacgtatatccactgtgaagcc

SEQ ID NO: 1648 - DNA, 35 bp, Artificial Sequence; identical to SEQ ID NO: 1605
  Synthetic oligonucleotide

SEQ ID NO: 1649 - DNA, 37 bp, Artificial Sequence
  Synthetic oligonucleotide
ttttgttaaacaacgccggcaagggtcgttgttacga

SEQ ID NO: 1650 - DNA, 37 bp, Artificial Sequence
  Synthetic oligonucleotide
ttttcgcattaaaaacgggtgtccaccggttggtgga

SEQ ID NO: 1651 - DNA, 36 bp, Artificial Sequence
  Synthetic oligonucleotide
cgcgcgagcaactacactaacggaaaacccgttcaa

SEQ ID NO: 1652 - DNA, 36 bp, Artificial Sequence
  Synthetic oligonucleotide
ctactcgccgcaacccaacactcagtcaaacgatca

SEQ ID NO: 1653 - DNA, 38 bp, Artificial Sequence
  Synthetic oligonucleotide
ataacgcacgtttccataactcataccactggccttga

SEQ ID NO: 1654 - DNA, 35 bp, Artificial Sequence
  Synthetic oligonucleotide
gagagaagtatttgttaagccacatagttttcttg

SEQ ID NO: 1655 - DNA, 36 bp, Artificial Sequence
  Synthetic oligonucleotide
ccttactgcatggtttggtaccgctattgtccccca

SEQ ID NO: 1656 - DNA, 37 bp, Artificial Sequence
  Synthetic oligonucleotide
aaaattatgcgccttagggaagacatacggcctgtga

SEQ ID NO: 1657 - DNA, 37 bp, Artificial Sequence
  Synthetic oligonucleotide
aatgatcggacttgcaggctcaaccctactgatggga

SEQ ID NO: 1658 - DNA, 35 bp, Artificial Sequence
  Synthetic oligonucleotide
aaggcacgtacacactatcacctggggtgtgcctc

SEQ ID NO: 1659 - DNA, 35 bp, Artificial Sequence
  Synthetic oligonucleotide
aatagattaaagtgaacgtgagtgtttccatatta

SEQ ID NO: 1660 - DNA, 38 bp, Artificial Sequence
  Synthetic oligonucleotide
aattcgtcactcgttgtgtgtagccggtgcccaattga

SEQ ID NO: 1661 - DNA, 36 bp, Artificial Sequence
  Synthetic oligonucleotide
acgggagatcctttaagtacgtcgaagccagcaata

SEQ ID NO: 1662 - DNA, 37 bp, Artificial Sequence
  Synthetic oligonucleotide
actccgttacgtgttggcgctttcagttcagcacgga

SEQ ID NO: 1663 - DNA, 35 bp, Artificial Sequence
  Synthetic oligonucleotide
agacagtggacttctcgtcgaaaatgcatctctat

SEQ ID NO: 1664 - DNA, 37 bp, Artificial Sequence
  Synthetic oligonucleotide
agagaacgttgcccttgagtgtttcttgagccttgga

SEQ ID NO: 1665 - DNA, 36 bp, Artificial Sequence
  Synthetic oligonucleotide
agcgtgtatcatcactgatttagttatcccgagcta

SEQ ID NO: 1666 - DNA, 36 bp, Artificial Sequence
  Synthetic oligonucleotide
agaggccagcttagtgtggccaccgtgagtttacta

SEQ ID NO: 1667 - DNA, 35 bp, Artificial Sequence
  Synthetic oligonucleotide
atatgtatacgaaccctcctaatcgcactatcagt

SEQ ID NO: 1668 - DNA, 38 bp, Artificial Sequence; identical to SEQ ID NO: 1653
  Synthetic oligonucleotide

SEQ ID NO: 1669 - DNA, 36 bp, Artificial Sequence
  Synthetic oligonucleotide
agtacctatcaaggattttgccgaatccgtgccgca

SEQ ID NO: 1670 - DNA, 35 bp, Artificial Sequence
  Synthetic oligonucleotide
agttcactctaacttccgtgccgaaggcgttatcc

SEQ ID NO: 1671 - DNA, 35 bp, Artificial Sequence
  Synthetic oligonucleotide
cacatcgactgcgcgatcaatattagggtggacat

SEQ ID NO: 1672 - DNA, 35 bp, Artificial Sequence
  Synthetic oligonucleotide
attgcattcttcaggacgcttcgcccgggattctt

SEQ ID NO: 1673 - DNA, 35 bp, Artificial Sequence
  Synthetic oligonucleotide
catccctgacgcgagttggaacatgagtacgtact

SEQ ID NO: 1674 - DNA, 36 bp, Artificial Sequence
  Synthetic oligonucleotide
caccgcttagtcttatttagggtcgctaatctggta

SEQ ID NO: 1675 - DNA, 36 bp, Artificial Sequence
  Synthetic oligonucleotide
caaaccgctgcaaaaggatccccgttatggctacat

SEQ ID NO: 1676 - DNA, 38 bp, Artificial Sequence
  Synthetic oligonucleotide
ccggaccattaggtcttcttgttcaaatactttgatga

SEQ ID NO: 1677 - DNA, 36 bp, Artificial Sequence
  Synthetic oligonucleotide
ccgagcttcgtttgggttcatttcgtccgattcgca

SEQ ID NO: 1678 - DNA, 38 bp, Artificial Sequence
  Synthetic oligonucleotide
cctcctattacagttccccgggaatgaatagcaactga

SEQ ID NO: 1679 - DNA, 38 bp, Artificial Sequence
  Synthetic oligonucleotide
cgcctataccgcactcgcttggaacgacacaaagctga

SEQ ID NO: 1680 - DNA, 38 bp, Artificial Sequence
  Synthetic oligonucleotide
cgtggattcgcccacatgatgatggccggtatgtttga

SEQ ID NO: 1681 - DNA, 37 bp, Artificial Sequence
  Synthetic oligonucleotide
ccttttgtaggacgccctttctgcgcatccggtagga

SEQ ID NO: 1682 - DNA, 37 bp, Artificial Sequence
  Synthetic oligonucleotide
ccttaactacacgagagcatgtcaaggggtaaatgga

SEQ ID NO: 1683 - DNA, 36 bp, Artificial Sequence; identical to SEQ ID NO: 1652
  Synthetic oligonucleotide

SEQ ID NO: 1684 - DNA, 38 bp, Artificial Sequence; identical to SEQ ID NO: 1562
  Synthetic oligonucleotide

SEQ ID NO: 1685 - DNA, 36 bp, Artificial Sequence
  Synthetic oligonucleotide
cggagtacgaagccgcttagattacctagcccgtta

SEQ ID NO: 1686 - DNA, 37 bp, Artificial Sequence
  Synthetic oligonucleotide
cgagcgacgtttgtttcaaaaatcactgggaatatga

SEQ ID NO: 1687 - DNA, 35 bp, Artificial Sequence
  Synthetic oligonucleotide
ctacatcgctctccgtaatcgggcgattcatttca

SEQ ID NO: 1688 - DNA, 38 bp, Artificial Sequence
  Synthetic oligonucleotide
gaaaacgttggaagtttttacgccgctctcagccgtga

SEQ ID NO: 1689 - DNA, 35 bp, Artificial Sequence
  Synthetic oligonucleotide
gaatttatgcaatccattaggaaaatgggtgtgcg

SEQ ID NO: 1690 - DNA, 36 bp, Artificial Sequence
  Synthetic oligonucleotide
ctgacagtcttccctggtctattgtccgcagatcga

SEQ ID NO: 1691 - DNA, 38 bp, Artificial Sequence; identical to SEQ ID NO: 1566
  Synthetic oligonucleotide

SEQ ID NO: 1692 - DNA, 36 bp, Artificial Sequence
  Synthetic oligonucleotide
gagggactgcacagcggtgatattctaaatgtacga

SEQ ID NO: 1693 - DNA, 38 bp, Artificial Sequence
  Synthetic oligonucleotide
gaccgggtaggcttctaggcgcccccctccttacttga

SEQ ID NO: 1694 - DNA, 35 bp, Artificial Sequence
  Synthetic oligonucleotide
gaccaaagtatgtgtggtattgatatgccgtgaac

SEQ ID NO: 1695 - DNA, 36 bp, Artificial Sequence
  Synthetic oligonucleotide
gagaaccgtgctcaaggcagaattgtcaccgctcga

SEQ ID NO: 1696 - DNA, 38 bp, Artificial Sequence
  Synthetic oligonucleotide
gacgagtgacttgcactacgaaggccctcgtcgcctga

SEQ ID NO: 1697 - DNA, 37 bp, Artificial Sequence
  Synthetic oligonucleotide
gagtttgtcttgccccgggtcgggacgttgtatccta

SEQ ID NO: 1698 - DNA, 35 bp, Artificial Sequence
  Synthetic oligonucleotide
gagtggcttactttcattggatccgtgagccttgc

SEQ ID NO: 1699 - DNA, 37 bp, Artificial Sequence
  Synthetic oligonucleotide
gcaatacgctagataggcttagaaacggaatacacga

SEQ ID NO: 1700 - DNA, 35 bp, Artificial Sequence
  Synthetic oligonucleotide
gatgtcgtcacggaagtacatatggcgctgtagcc

SEQ ID NO: 1701 - DNA, 35 bp, Artificial Sequence
  Synthetic oligonucleotide
gccactggatttaactgcatcccgtctctgaggct

SEQ ID NO: 1702 - DNA, 35 bp, Artificial Sequence; identical to SEQ ID NO: 1570
  Synthetic oligonucleotide

SEQ ID NO: 1703 - DNA, 37 bp, Artificial Sequence
  Synthetic oligonucleotide
gcaatatgggatatgtgtaactcagtgagacaggaga

SEQ ID NO: 1704 - DNA, 37 bp, Artificial Sequence
  Synthetic oligonucleotide
gattacataactcgtacgtcgcttgttttaagtttga

SEQ ID NO: 1705 - DNA, 37 bp, Artificial Sequence
  Synthetic oligonucleotide
gcgtgctgctttgtactacggtctcatcgttgtagga

SEQ ID NO: 1706 - DNA, 35 bp, Artificial Sequence
  Synthetic oligonucleotide
gccctggcaccaaagtcgcacaatcaatcgtgtgc

SEQ ID NO: 1707 - DNA, 36 bp, Artificial Sequence
  Synthetic oligonucleotide
gccgttggtattctgtcgtcttcctttgttctatca

SEQ ID NO: 1708 - DNA, 37 bp, Artificial Sequence
  Synthetic oligonucleotide
ggcactgtgctgcgatcaggaaaagtcacataccgga

SEQ ID NO: 1709 - DNA, 38 bp, Artificial Sequence
  Synthetic oligonucleotide
ggcccttgaattaacatgatgaatatcacaacgggtga

SEQ ID NO: 1710 - DNA, 36 bp, Artificial Sequence
  Synthetic oligonucleotide
gggtgtttcctgcttatgactacttttctttacgca

SEQ ID NO: 1711 - DNA, 35 bp, Artificial Sequence
  Synthetic oligonucleotide
ggctcgtattttcccagtatcgtttccggtacgtc

SEQ ID NO: 1712 - DNA, 35 bp, Artificial Sequence
  Synthetic oligonucleotide
ggggatctcgggcgatgaagcctagctattgtact

SEQ ID NO: 1713 - DNA, 35 bp, Artificial Sequence
  Synthetic oligonucleotide
ggtcccgtattccagatatactaacggttaccacc

SEQ ID NO: 1714 - DNA, 37 bp, Artificial Sequence
  Synthetic oligonucleotide
gtactgtccgtgtgaacgggtctctgcagaaattcga

SEQ ID NO: 1715 - DNA, 38 bp, Artificial Sequence
  Synthetic oligonucleotide
gtgatcggtactgttgaacttgttgcaccgcccgctga

SEQ ID NO: 1716 - DNA, 38 bp, Artificial Sequence
  Synthetic oligonucleotide
gtgtcacatggggtgaccggattgaggagaggatatga

SEQ ID NO: 1717 - DNA, 37 bp, Artificial Sequence
  Synthetic oligonucleotide
gtgtcctttctgggttgatgcatttacggtttggtga

SEQ ID NO: 1718 - DNA, 37 bp, Artificial Sequence
  Synthetic oligonucleotide
gttcggttggttcccgcgctgaacaatattacctgga

SEQ ID NO: 1719 - DNA, 36 bp, Artificial Sequence
  Synthetic oligonucleotide
gttgggacccgattaacccaacagaattcggaataa

SEQ ID NO: 1720 - DNA, 36 bp, Artificial Sequence
  Synthetic oligonucleotide
tacctgagcgctggagctcgttagtcggaataggaa

SEQ ID NO: 1721 - DNA, 35 bp, Artificial Sequence
  Synthetic oligonucleotide
tacccgttcaccggataggatgttcgtccttaatt

SEQ ID NO: 1722 - DNA, 38 bp, Artificial Sequence
  Synthetic oligonucleotide
taccgatcaacccagcaaggcttgggtggattgaatga

SEQ ID NO: 1723 - DNA, 36 bp, Artificial Sequence
  Synthetic oligonucleotide
tccccccgtcgcttacggtgttggacgggctcatta

SEQ ID NO: 1724 - DNA, 36 bp, Artificial Sequence
  Synthetic oligonucleotide
tcttcataaatgactaacgcttcttagtgatgttga

SEQ ID NO: 1725 - DNA, 36 bp, Artificial Sequence
  Synthetic oligonucleotide
tgccatacctacccagagtgagacttctagcctgga

SEQ ID NO: 1726 - DNA, 38 bp, Artificial Sequence
  Synthetic oligonucleotide
tgaggtcccttttgtcggggtatatccatgaggtttga

SEQ ID NO: 1727 - DNA, 37 bp, Artificial Sequence
  Synthetic oligonucleotide
tggcttggcccgttcgttcgtgatcaagattttttga

SEQ ID NO: 1728 - DNA, 38 bp, Artificial Sequence
  Synthetic oligonucleotide
tggtctgaaattcccgtgaggagatagatcatttctga

SEQ ID NO: 1729 - DNA, 35 bp, Artificial Sequence
  Synthetic oligonucleotide
tgtccaaatcactcattctcgtaaggttaccgtcc

SEQ ID NO: 1730 - DNA, 36 bp, Artificial Sequence
  Synthetic oligonucleotide
tgttctgtcttatgccatgaagttcttataagtaga

SEQ ID NO: 1731 - DNA, 38 bp, Artificial Sequence
  Synthetic oligonucleotide
ttacccctgtaatgccctacatgatgttcggttcatga

SEQ ID NO: 1732 - DNA, 35 bp, Artificial Sequence
  Synthetic oligonucleotide
ttgtaccagtgcgtatgttgtctcatcaatgtttt

SEQ ID NO: 1733 - DNA, 37 bp, Artificial Sequence
  Synthetic oligonucleotide
ttttagcaacgggagttgcagcggggttgttaaacga

SEQ ID NO: 1734 - DNA, 35 bp, Artificial Sequence; identical to SEQ ID NO: 1591
  Synthetic oligonucleotide

SEQ ID NO: 1735 - DNA, 36 bp, Artificial Sequence; identical to SEQ ID NO: 1586
  Synthetic oligonucleotide

SEQ ID NO: 1736 - DNA, 36 bp, Artificial Sequence; identical to SEQ ID NO: 1589
  Synthetic oligonucleotide

SEQ ID NO: 1737 - DNA, 38 bp, Artificial Sequence; identical to SEQ ID NO: 1612
  Synthetic oligonucleotide

SEQ ID NO: 1738 - DNA, 35 bp, Artificial Sequence; identical to SEQ ID NO: 1594
  Synthetic oligonucleotide

SEQ ID NO: 1739 - DNA, 37 bp, Artificial Sequence; identical to SEQ ID NO: 1595
  Synthetic oligonucleotide

SEQ ID NO: 1740 - DNA, 35 bp, Artificial Sequence
  Synthetic oligonucleotide
attccgtgaggtacgtaaggcaaccagttttattt

SEQ ID NO: 1741 - DNA, 36 bp, Artificial Sequence; identical to SEQ ID NO: 1593
  Synthetic oligonucleotide

SEQ ID NO: 1742 - DNA, 37 bp, Artificial Sequence; identical to SEQ ID NO: 1587
  Synthetic oligonucleotide

SEQ ID NO: 1743 - DNA, 38 bp, Artificial Sequence; identical to SEQ ID NO: 1596
  Synthetic oligonucleotide

SEQ ID NO: 1744 - DNA, 35 bp, Artificial Sequence; identical to SEQ ID NO: 1600
  Synthetic oligonucleotide

SEQ ID NO: 1745 - DNA, 35 bp, Artificial Sequence; identical to SEQ ID NO: 1606
  Synthetic oligonucleotide

SEQ ID NO: 1746 - DNA, 38 bp, Artificial Sequence; identical to SEQ ID NO: 1608
  Synthetic oligonucleotide

SEQ ID NO: 1747 - DNA, 38 bp, Artificial Sequence; identical to SEQ ID NO: 1601
  Synthetic oligonucleotide

SEQ ID NO: 1748 - DNA, 35 bp, Artificial Sequence; identical to SEQ ID NO: 1605
  Synthetic oligonucleotide

SEQ ID NO: 1749 - DNA, 36 bp, Artificial Sequence; identical to SEQ ID NO: 1611
  Synthetic oligonucleotide

SEQ ID NO: 1750 - DNA, 36 bp, Artificial Sequence
  Synthetic oligonucleotide
tcttgtcgggattttgctcctttcatactcatggta

SEQ ID NO: 1751 - DNA, 36 bp, Artificial Sequence; identical to SEQ ID NO: 1598
  Synthetic oligonucleotide

SEQ ID NO: 1752 - DNA, 35 bp, Artificial Sequence; identical to SEQ ID NO: 1599
  Synthetic oligonucleotide

SEQ ID NO: 1753 - DNA, 36 bp, Artificial Sequence; identical to SEQ ID NO: 1603
  Synthetic oligonucleotide

SEQ ID NO: 1754 - DNA, 38 bp, Artificial Sequence; identical to SEQ ID NO: 1609
  Synthetic oligonucleotide

SEQ ID NO: 1755 - DNA, 36 bp, Artificial Sequence; identical to SEQ ID NO: 1593
  Synthetic oligonucleotide

SEQ ID NO: 1756 - DNA, 35 bp, Artificial Sequence; identical to SEQ ID NO: 1591
  Synthetic oligonucleotide

SEQ ID NO: 1757 - DNA, 36 bp, Artificial Sequence; identical to SEQ ID NO: 1590
  Synthetic oligonucleotide

SEQ ID NO: 1758 - DNA, 36 bp, Artificial Sequence; identical to SEQ ID NO: 1617
  Synthetic oligonucleotide

SEQ ID NO: 1759 - DNA, 36 bp, Artificial Sequence; identical to SEQ ID NO: 1616
  Synthetic oligonucleotide

SEQ ID NO: 1760 - DNA, 36 bp, Artificial Sequence; identical to SEQ ID NO: 1586
  Synthetic oligonucleotide

SEQ ID NO: 1761 - DNA, 35 bp, Artificial Sequence; identical to SEQ ID NO: 1620
  Synthetic oligonucleotide

SEQ ID NO: 1762 - DNA, 35 bp, Artificial Sequence; identical to SEQ ID NO: 1594
  Synthetic oligonucleotide

SEQ ID NO: 1763 - DNA, 37 bp, Artificial Sequence; identical to SEQ ID NO: 1587
  Synthetic oligonucleotide

SEQ ID NO: 1764 - DNA, 38 bp, Artificial Sequence; identical to SEQ ID NO: 1596
  Synthetic oligonucleotide

SEQ ID NO: 1765 - DNA, 36 bp, Artificial Sequence; identical to SEQ ID NO: 1589
  Synthetic oligonucleotide

SEQ ID NO: 1766 - DNA, 37 bp, Artificial Sequence; identical to SEQ ID NO: 1595
  Synthetic oligonucleotide

SEQ ID NO: 1767 - DNA, 37 bp, Artificial Sequence
  Synthetic oligonucleotide
gagcgactcatcccggggtttggatcagcgctccgga

SEQ ID NO: 1768 - DNA, 37 bp, Artificial Sequence; identical to SEQ ID NO: 1628
  Synthetic oligonucleotide

SEQ ID NO: 1769 - DNA, 36 bp, Artificial Sequence
  Synthetic oligonucleotide
ggtctcttggtttagatcccgtcttttctgtggaaa

SEQ ID NO: 1770 - DNA, 38 bp, Artificial Sequence; identical to SEQ ID NO: 1601
  Synthetic oligonucleotide

SEQ ID NO: 1771 - DNA, 35 bp, Artificial Sequence; identical to SEQ ID NO: 1606
  Synthetic oligonucleotide

SEQ ID NO: 1772 - DNA, 38 bp, Artificial Sequence
  Synthetic oligonucleotide
gtccaggctctatgcttagtacccgttcatttgcttga

SEQ ID NO: 1773 - DNA, 36 bp, Artificial Sequence; identical to SEQ ID NO: 1603
  Synthetic oligonucleotide

SEQ ID NO: 1774 - DNA, 38 bp, Artificial Sequence; identical to SEQ ID NO: 1636
  Synthetic oligonucleotide

SEQ ID NO: 1775 - DNA, 35 bp, Artificial Sequence; identical to SEQ ID NO: 1637
  Synthetic oligonucleotide

SEQ ID NO: 1776 - DNA, 36 bp, Artificial Sequence; identical to SEQ ID NO: 1638
  Synthetic oligonucleotide

SEQ ID NO: 1777 - DNA, 35 bp, Artificial Sequence
  Synthetic oligonucleotide
tcctagaaatctgtattgtttctcaaggccacctg

SEQ ID NO: 1778 - DNA, 37 bp, Artificial Sequence; identical to SEQ ID NO: 1639
  Synthetic oligonucleotide

SEQ ID NO: 1779 - DNA, 36 bp, Artificial Sequence; identical to SEQ ID NO: 1750
  Synthetic oligonucleotide

SEQ ID NO: 1780 - DNA, 38 bp, Artificial Sequence; identical to SEQ ID NO: 1609
  Synthetic oligonucleotide

SEQ ID NO: 1781 - DNA, 35 bp, Artificial Sequence
  Synthetic oligonucleotide
tgttttatctggatcacactagctattgtacggtt

SEQ ID NO: 1782 - DNA, 37 bp, Artificial Sequence; identical to SEQ ID NO: 1643
  Synthetic oligonucleotide

SEQ ID NO: 1783 - DNA, 37 bp, Artificial Sequence; identical to SEQ ID NO: 1645
  Synthetic oligonucleotide

SEQ ID NO: 1784 - DNA, 37 bp, Artificial Sequence; identical to SEQ ID NO: 1646
  Synthetic oligonucleotide

SEQ ID NO: 1785 - DNA, 35 bp, Artificial Sequence; identical to SEQ ID NO: 1647
  Synthetic oligonucleotide

SEQ ID NO: 1786 - DNA, 35 bp, Artificial Sequence; identical to SEQ ID NO: 1605
  Synthetic oligonucleotide

SEQ ID NO: 1787 - DNA, 37 bp, Artificial Sequence
  Synthetic oligonucleotide
tttgagcgcctcagtttgcgcgacttccagcccgtga

SEQ ID NO: 1788 - DNA, 37 bp, Artificial Sequence; identical to SEQ ID NO: 1649
  Synthetic oligonucleotide

SEQ ID NO: 1789 - DNA, 37 bp, Artificial Sequence; identical to SEQ ID NO: 1650
  Synthetic oligonucleotide

SEQ ID NO: 1790 - DNA, 36 bp, Artificial Sequence; identical to SEQ ID NO: 1652
  Synthetic oligonucleotide

SEQ ID NO: 1791 - DNA, 38 bp, Artificial Sequence; identical to SEQ ID NO: 1653
  Synthetic oligonucleotide

SEQ ID NO: 1792 - DNA, 38 bp, Artificial Sequence
  Synthetic oligonucleotide
atgctatcccgtgaaacgagaacatacggtttttttga

SEQ ID NO: 1793 - DNA, 35 bp, Artificial Sequence; identical to SEQ ID NO: 1654
  Synthetic oligonucleotide

SEQ ID NO: 1794 - DNA, 36 bp, Artificial Sequence; identical to SEQ ID NO: 1540
  Synthetic oligonucleotide

SEQ ID NO: 1795 - DNA, 36 bp, Artificial Sequence
  Synthetic oligonucleotide
agggcaatctgtcccgccctcagcttttttatttaa

SEQ ID NO: 1796 - DNA, 37 bp, Artificial Sequence; identical to SEQ ID NO: 1555
  Synthetic oligonucleotide

SEQ ID NO: 1797 - DNA, 38 bp, Artificial Sequence; identical to SEQ ID NO: 1543
  Synthetic oligonucleotide

SEQ ID NO: 1798 - DNA, 38 bp, Artificial Sequence
  Synthetic oligonucleotide
accgaaaacccgttcccgccgtactgcttctatattga

SEQ ID NO: 1799 - DNA, 36 bp, Artificial Sequence; identical to SEQ ID NO: 1549
  Synthetic oligonucleotide

SEQ ID NO: 1800 - DNA, 36 bp, Artificial Sequence; identical to SEQ ID NO: 1547
  Synthetic oligonucleotide

SEQ ID NO: 1801 - DNA, 35 bp, Artificial Sequence; identical to SEQ ID NO: 1550
  Synthetic oligonucleotide

SEQ ID NO: 1802 - DNA, 35 bp, Artificial Sequence; identical to SEQ ID NO: 1551
  Synthetic oligonucleotide

SEQ ID NO: 1803 - DNA, 35 bp, Artificial Sequence; identical to SEQ ID NO: 1546
  Synthetic oligonucleotide

SEQ ID NO: 1804 - DNA, 38 bp, Artificial Sequence
  Synthetic oligonucleotide
tttccgattattatgaccgcttttattattggaggtga

SEQ ID NO: 1805 - DNA, 38 bp, Artificial Sequence
  Synthetic oligonucleotide
tcttggacgtgcgtgatccccattttatatatgattga

SEQ ID NO: 1806 - DNA, 38 bp, Artificial Sequence; identical to SEQ ID NO: 1543
  Synthetic oligonucleotide

SEQ ID NO: 1807 - DNA, 36 bp, Artificial Sequence; identical to SEQ ID NO: 1553
  Synthetic oligonucleotide

SEQ ID NO: 1808 - DNA, 36 bp, Artificial Sequence; identical to SEQ ID NO: 1540
  Synthetic oligonucleotide

SEQ ID NO: 1809 - DNA, 37 bp, Artificial Sequence; identical to SEQ ID NO: 1542
  Synthetic oligonucleotide

SEQ ID NO: 1810 - DNA, 36 bp, Artificial Sequence; identical to SEQ ID NO: 1549
  Synthetic oligonucleotide

SEQ ID NO: 1811 - DNA, 35 bp, Artificial Sequence; identical to SEQ ID NO: 1551
  Synthetic oligonucleotide

SEQ ID NO: 1812 - DNA, 38 bp, Artificial Sequence; identical to SEQ ID NO: 1805
  Synthetic oligonucleotide

SEQ ID NO: 1813 - DNA, 35 bp, Artificial Sequence; identical to SEQ ID NO: 1546
  Synthetic oligonucleotide

SEQ ID NO: 1814 - DNA, 38 bp, Artificial Sequence
  Synthetic oligonucleotide
tgcccttagtttccgtatgaccactttgattcttttga

SEQ ID NO: 1815 - DNA, 38 bp, Artificial Sequence; identical to SEQ ID NO: 1804
  Synthetic oligonucleotide

SEQ ID NO: 1816 - DNA, 38 bp, Artificial Sequence
  Synthetic oligonucleotide
attcgcatagcctatgggaagggaattgtgaggggtga

SEQ ID NO: 1817 - DNA, 38 bp, Artificial Sequence
  Synthetic oligonucleotide
gaggttccctgtgggtcatgtcgcacgatttttagtga

SEQ ID NO: 1818 - DNA, 38 bp, Artificial Sequence; identical to SEQ ID NO: 1543
  Synthetic oligonucleotide

SEQ ID NO: 1819 - DNA, 38 bp, Artificial Sequence; identical to SEQ ID NO: 1548
  Synthetic oligonucleotide

SEQ ID NO: 1820 - DNA, 37 bp, Artificial Sequence
  Synthetic oligonucleotide
tgcccgcttttggtttatatggcttcttatctttcga

SEQ ID NO: 1821 - DNA, 38 bp, Artificial Sequence; identical to SEQ ID NO: 1804
  Synthetic oligonucleotide

SEQ ID NO: 1822 - DNA, 35 bp, Artificial Sequence; identical to SEQ ID NO: 1550
  Synthetic oligonucleotide

SEQ ID NO: 1823 - DNA, 38 bp, Artificial Sequence
  Synthetic oligonucleotide
aaacgtgggggcgtcccagccccatgtgttatctctga

SEQ ID NO: 1824 - DNA, 38 bp, Artificial Sequence
  Synthetic oligonucleotide
aaccctctcccatcctctcgaaacactagattacctga

SEQ ID NO: 1825 - DNA, 35 bp, Artificial Sequence
  Synthetic oligonucleotide
aacatacgtcccaagcgcatctcgattctatcttc

SEQ ID NO: 1826 - DNA, 37 bp, Artificial Sequence
  Synthetic oligonucleotide
aaccacgcctaaatggattcacttcctcaaaaattga

SEQ ID NO: 1827 - DNA, 37 bp, Artificial Sequence
  Synthetic oligonucleotide
aacgccgcacttcgttaaaagtctataaaactctaga

SEQ ID NO: 1828 - DNA, 37 bp, Artificial Sequence
  Synthetic oligonucleotide
aacgaagtattataacccttgtgtatcccgaccatga

SEQ ID NO: 1829 - DNA, 35 bp, Artificial Sequence
  Synthetic oligonucleotide
aacaaagttcacccataccacaaccccaattcgac

SEQ ID NO: 1830 - DNA, 38 bp, Artificial Sequence
  Synthetic oligonucleotide
aacggctgggaggggtagcattttaactatatttctga

SEQ ID NO: 1831 - DNA, 38 bp, Artificial Sequence
  Synthetic oligonucleotide
aagtggtccgtttcggcaataagtacaacgggatctga

SEQ ID NO: 1832 - DNA, 38 bp, Artificial Sequence
  Synthetic oligonucleotide
aactctgcataactaaccgacgccaactattatcctga

SEQ ID NO: 1833 - DNA, 36 bp, Artificial Sequence
  Synthetic oligonucleotide
aatcaggcttgtttgctagacaaaataagcacgaaa

SEQ ID NO: 1834 - DNA, 38 bp, Artificial Sequence
  Synthetic oligonucleotide
aattgcgttttccggttgactaaaaacacggaatctga

SEQ ID NO: 1835 - DNA, 36 bp, Artificial Sequence
  Synthetic oligonucleotide
aataaacacttcgaccaaactaaggccttatctcca

SEQ ID NO: 1836 - DNA, 38 bp, Artificial Sequence
  Synthetic oligonucleotide
aagtttcctggtcgcccgcttctgaaaagttagtttga

SEQ ID NO: 1837 - DNA, 38 bp, Artificial Sequence
  Synthetic oligonucleotide
aagagggctatgatttagccggtgcctccttgctttga

SEQ ID NO: 1838 - DNA, 37 bp, Artificial Sequence
  Synthetic oligonucleotide
aagccggtatcgcccgtaacattcccttcctctagga

SEQ ID NO: 1839 - DNA, 38 bp, Artificial Sequence
  Synthetic oligonucleotide
aacttcaccgatacggttcttttctctaacccgcttga

SEQ ID NO: 1840 - DNA, 37 bp, Artificial Sequence
  Synthetic oligonucleotide
aaggatagccataggctgatggggactcaacaggtga

SEQ ID NO: 1841 - DNA, 36 bp, Artificial Sequence
  Synthetic oligonucleotide
aatcgtcttacgtgcccttgataaatcccatactaa

SEQ ID NO: 1842 - DNA, 38 bp, Artificial Sequence
  Synthetic oligonucleotide
aattcgcgcgaattgaagaggcccatggcccgctctga

SEQ ID NO: 1843 - DNA, 37 bp, Artificial Sequence
  Synthetic oligonucleotide
accatgaatcaccgcgcctgctactgcaacttttgga

SEQ ID NO: 1844 - DNA, 36 bp, Artificial Sequence
  Synthetic oligonucleotide
acactggcatttttcgaaacatagaatgaatgggaa

SEQ ID NO: 1845 - DNA, 37 bp, Artificial Sequence
  Synthetic oligonucleotide
acacccacaagctttaacttatcataactcgccccga

SEQ ID NO: 1846 - DNA, 35 bp, Artificial Sequence
  Synthetic oligonucleotide
acccaacgttgagcgcaataccccttcataatacc

SEQ ID NO: 1847 - DNA, 35 bp, Artificial Sequence
  Synthetic oligonucleotide
acctctctctgaaatttaactctattctcccattc

SEQ ID NO: 1848 - DNA, 35 bp, Artificial Sequence
  Synthetic oligonucleotide
accggactagatatttaccacattgcatttccata

SEQ ID NO: 1849 - DNA, 35 bp, Artificial Sequence
  Synthetic oligonucleotide
acgctgaatctggttcacaacggggaacgtgttag

SEQ ID NO: 1850 - DNA, 38 bp, Artificial Sequence
  Synthetic oligonucleotide
acccgctgtgtgaaccaccgtgccttcggacgtcatga

SEQ ID NO: 1851 - DNA, 35 bp, Artificial Sequence
  Synthetic oligonucleotide
accgctctctgaaatttatctctattctcccattc

SEQ ID NO: 1852 - DNA, 36 bp, Artificial Sequence
  Synthetic oligonucleotide
acggtacactcactttcctaaatccctctttatcta

SEQ ID NO: 1853 - DNA, 38 bp, Artificial Sequence
  Synthetic oligonucleotide
acgccccagcctatttaccttggagtttctttgactga

SEQ ID NO: 1854 - DNA, 35 bp, Artificial Sequence
  Synthetic oligonucleotide
acccggcgaagacgttagctctggcgctccgttca

SEQ ID NO: 1855 - DNA, 38 bp, Artificial Sequence
  Synthetic oligonucleotide
actatcccaggtttacattagtgtgccccgcattctga

SEQ ID NO: 1856 - DNA, 38 bp, Artificial Sequence
  Synthetic oligonucleotide
actgctttttttgcccaatatctcgagtaaccccctga

SEQ ID NO: 1857 - DNA, 35 bp, Artificial Sequence
  Synthetic oligonucleotide
actgaacactctacatgaccataaacacctctctt

SEQ ID NO: 1858 - DNA, 37 bp, Artificial Sequence
  Synthetic oligonucleotide
actcgggcttccatcaagcttctgattggtgaggtga

SEQ ID NO: 1859 - DNA, 35 bp, Artificial Sequence
  Synthetic oligonucleotide
actgaacactctacatgactgtaaacacctctctt

SEQ ID NO: 1860 - DNA, 38 bp, Artificial Sequence
  Synthetic oligonucleotide
acgtttttctcgctcgtaattttatcgttaatttctga

SEQ ID NO: 1861 - DNA, 37 bp, Artificial Sequence
  Synthetic oligonucleotide
actactcatccccccgtcttaacaacgatcccactga

SEQ ID NO: 1862 - DNA, 37 bp, Artificial Sequence
  Synthetic oligonucleotide
actacgcgctcatcggccagagttccggtcaaccgga

SEQ ID NO: 1863 - DNA, 36 bp, Artificial Sequence
  Synthetic oligonucleotide
acttcacccacacaatacccttatcgataactcaaa

SEQ ID NO: 1864 - DNA, 36 bp, Artificial Sequence
  Synthetic oligonucleotide
acgttacgccgggggactataagcagttcagtagca

SEQ ID NO: 1865 - DNA, 36 bp, Artificial Sequence
  Synthetic oligonucleotide
agacctattccccaatcctgaattacaacatctcta

SEQ ID NO: 1866 - DNA, 35 bp, Artificial Sequence
  Synthetic oligonucleotide
agcacccgcccgcttctattcctcgatcctacact

SEQ ID NO: 1867 - DNA, 35 bp, Artificial Sequence
  Synthetic oligonucleotide
agccccagagtttatccggcttggccggcaattcc

SEQ ID NO: 1868 - DNA, 35 bp, Artificial Sequence
  Synthetic oligonucleotide
aggaatcgatcctggtggttttagctttgaccctt

SEQ ID NO: 1869 - DNA, 37 bp, Artificial Sequence
  Synthetic oligonucleotide
agacttagactcaataactggaccctttacacaccgt

SEQ ID NO: 1870 - DNA, 37 bp, Artificial Sequence; identical to SEQ ID NO: 1555
  Synthetic oligonucleotide

SEQ ID NO: 1871 - DNA, 38 bp, Artificial Sequence
  Synthetic oligonucleotide
atacacgctgcccatttccactcgtcaaaccactatga

SEQ ID NO: 1872 - DNA, 35 bp, Artificial Sequence
  Synthetic oligonucleotide
agttcgcgcaaccccttctcgcttgtgtggcttaa

SEQ ID NO: 1873 - DNA, 35 bp, Artificial Sequence
  Synthetic oligonucleotide
atcaagccggtgtaggcgctccaggcctttcagcc

SEQ ID NO: 1874 - DNA, 35 bp, Artificial Sequence
  Synthetic oligonucleotide
agtcatccattacctcaatgttcatctattttcac

SEQ ID NO: 1875 - DNA, 38 bp, Artificial Sequence
  Synthetic oligonucleotide
atcctctacgttccaaccacttacttttatgccattga

SEQ ID NO: 1876 - DNA, 38 bp, Artificial Sequence
  Synthetic oligonucleotide
atcacactctaactgtaatcaatcatttcgaaccctga

SEQ ID NO: 1877 - DNA, 38 bp, Artificial Sequence
  Synthetic oligonucleotide
atcccttccaattccctataattactactctaatgtga

SEQ ID NO: 1878 - DNA, 37 bp, Artificial Sequence
  Synthetic oligonucleotide
atcccacttgccatcttcggtcctatcaaatggtaga

SEQ ID NO: 1879 - DNA, 34 bp, Artificial Sequence
  Synthetic oligonucleotide
atcttaatgccttgatccgactcctacctcttga

SEQ ID NO: 1880 - DNA, 38 bp, Artificial Sequence
  Synthetic oligonucleotide
atgccccccgcgcttttaactcacacctgctctgctga

SEQ ID NO: 1881 - DNA, 35 bp, Artificial Sequence
  Synthetic oligonucleotide
atgcagtcgttaacgtccatcgcgtgtgtcttccg

SEQ ID NO: 1882 - DNA, 38 bp, Artificial Sequence
  Synthetic oligonucleotide
atcccttttattgttaaacttcatagaaatcatactga

SEQ ID NO: 1883 - DNA, 37 bp, Artificial Sequence
  Synthetic oligonucleotide
atcttcccgccacttgtgccttatcattaccccccga

SEQ ID NO: 1884 - DNA, 36 bp, Artificial Sequence
  Synthetic oligonucleotide
atcccaattcacatacactctcaccctcactaaaca

SEQ ID NO: 1885 - DNA, 36 bp, Artificial Sequence
  Synthetic oligonucleotide
atctacaccctatcgaaacttcccatgaaactacaa

SEQ ID NO: 1886 - DNA, 35 bp, Artificial Sequence
  Synthetic oligonucleotide
attggtgcccgttgtgaggatcaagcaacatgcta

SEQ ID NO: 1887 - DNA, 38 bp, Artificial Sequence
  Synthetic oligonucleotide
caaacgtaccttactgcatacaccttccctgttattga

SEQ ID NO: 1888 - DNA, 35 bp, Artificial Sequence
  Synthetic oligonucleotide
attgaacgagcgagaaatctaagcgccggcatctg

SEQ ID NO: 1889 - DNA, 35 bp, Artificial Sequence
  Synthetic oligonucleotide
atttcctaacattgctctcttaactgttcctatcc

SEQ ID NO: 1890 - DNA, 37 bp, Artificial Sequence
  Synthetic oligonucleotide
cacctggccattacactttccttttgagttctctcga

SEQ ID NO: 1891 - DNA, 38 bp, Artificial Sequence
  Synthetic oligonucleotide
attttagcatacggctccttggtttcatcagctgttga

SEQ ID NO: 1892 - DNA, 35 bp, Artificial Sequence
  Synthetic oligonucleotide
attcgaattctccacctgataaccgccacattaaa

SEQ ID NO: 1893 - DNA, 36 bp, Artificial Sequence
  Synthetic oligonucleotide
atgtttgtcggcctttgtgggtcctttcgcttccca

SEQ ID NO: 1894 - DNA, 38 bp, Artificial Sequence
  Synthetic oligonucleotide
ccgcaacccaactcgtattctaatctactacacattga

SEQ ID NO: 1895 - DNA, 36 bp, Artificial Sequence; identical to SEQ ID NO: 1541
  Synthetic oligonucleotide

SEQ ID NO: 1896 - DNA, 35 bp, Artificial Sequence
  Synthetic oligonucleotide
ccccaaggacgcacgggggtacccgcatactgtta

SEQ ID NO: 1897 - DNA, 36 bp, Artificial Sequence
  Synthetic oligonucleotide
ccagccggtccaggtggctgacccgcgaaggagcta

SEQ ID NO: 1898 - DNA, 37 bp, Artificial Sequence
  Synthetic oligonucleotide
cccgtcatgaaccgggacccaatcttaccttttatga

SEQ ID NO: 1899 - DNA, 37 bp, Artificial Sequence
  Synthetic oligonucleotide
ccgcgcgttagctacggatggcattaacccagttgga

SEQ ID NO: 1900 - DNA, 38 bp, Artificial Sequence
  Synthetic oligonucleotide
catggctctcatccgaagacgcgccttcttctatttga

SEQ ID NO: 1901 - DNA, 38 bp, Artificial Sequence
  Synthetic oligonucleotide
ccgctggcgctattttttttctatgctgttggagctga

SEQ ID NO: 1902 - DNA, 36 bp, Artificial Sequence
  Synthetic oligonucleotide
catggatttagtcgtccctagccgaacttctgttaa

SEQ ID NO: 1903 - DNA, 38 bp, Artificial Sequence
  Synthetic oligonucleotide
ccgcttaacggggcacccaactaattcgatatctctga

SEQ ID NO: 1904 - DNA, 36 bp, Artificial Sequence
  Synthetic oligonucleotide
cggtccgtcgacccatgttttttggctctattgcta

SEQ ID NO: 1905 - DNA, 36 bp, Artificial Sequence; identical to SEQ ID NO: 1540
  Synthetic oligonucleotide

SEQ ID NO: 1906 - DNA, 38 bp, Artificial Sequence
  Synthetic oligonucleotide
cgctattattactctccccgggtaatatcctatattga

SEQ ID NO: 1907 - DNA, 36 bp, Artificial Sequence
  Synthetic oligonucleotide
ccttgaaaggtgtaacgcacgttggatcgtcgtgaa

SEQ ID NO: 1908 - DNA, 36 bp, Artificial Sequence
  Synthetic oligonucleotide
cgacgaaaccggacaccatacccttacgacttttaa

SEQ ID NO: 1909 - DNA, 35 bp, Artificial Sequence
  Synthetic oligonucleotide
ccttaccccgagcgtgcccccttcttaagtattcg

SEQ ID NO: 1910 - DNA, 36 bp, Artificial Sequence
  Synthetic oligonucleotide
cgttttatagtttcgatctaaggttcattatatata

SEQ ID NO: 1911 - DNA, 38 bp, Artificial Sequence
  Synthetic oligonucleotide
cgcttaattcttggttatattatctaactacgcaatga

SEQ ID NO: 1912 - DNA, 37 bp, Artificial Sequence
  Synthetic oligonucleotide
ctctaccgagtcccttacatatgtacccacttccaga

SEQ ID NO: 1913 - DNA, 37 bp, Artificial Sequence
  Synthetic oligonucleotide
gaacccgagggagggattctcaatgtgcaatgtatga

SEQ ID NO: 1914 - DNA, 38 bp, Artificial Sequence
  Synthetic oligonucleotide
cttcggggcactaccttcgtttttttgttctactatga

SEQ ID NO: 1915 - DNA, 37 bp, Artificial Sequence
  Synthetic oligonucleotide
gaagccccataaaagacgccgaaatattgcatctgga

SEQ ID NO: 1916 - DNA, 37 bp, Artificial Sequence
  Synthetic oligonucleotide
gaaactaaaccgactgggttaaattttatcatgcgga

SEQ ID NO: 1917 - DNA, 37 bp, Artificial Sequence
  Synthetic oligonucleotide
gagcttaaacctctccgagcgcttatggctcgattga

SEQ ID NO: 1918 - DNA, 35 bp, Artificial Sequence
  Synthetic oligonucleotide
gaggaaacgcggcagccttataggccgatctttca

SEQ ID NO: 1919 - DNA, 38 bp, Artificial Sequence
  Synthetic oligonucleotide
gaggtttaataaataggccatgcttattggtccgctga

SEQ ID NO: 1920 - DNA, 37 bp, Artificial Sequence
  Synthetic oligonucleotide
gatcacgtcgcggattcccccgtttcgcgagaggaga

SEQ ID NO: 1921 - DNA, 37 bp, Artificial Sequence
  Synthetic oligonucleotide
gagttcctttatttgcatttttatcagatcaagttta

SEQ ID NO: 1922 - DNA, 36 bp, Artificial Sequence
  Synthetic oligonucleotide
gagtcctctacttcatataatctccagaggggggga

SEQ ID NO: 1923 - DNA, 35 bp, Artificial Sequence
  Synthetic oligonucleotide
gagtttcgatattcgtcttaaatccacccctgtaa

SEQ ID NO: 1924 - DNA, 36 bp, Artificial Sequence
  Synthetic oligonucleotide
gagtacgatttgaccactatcttcgtagattccata

SEQ ID NO: 1925 - DNA, 37 bp, Artificial Sequence
  Synthetic oligonucleotide
gataacgggaaccaaatcgcgctgtagaggcctggga

SEQ ID NO: 1926 - DNA, 36 bp, Artificial Sequence
  Synthetic oligonucleotide
gatctacccgaccctattaaccttagtacttgacaa

SEQ ID NO: 1927 - DNA, 38 bp, Artificial Sequence
  Synthetic oligonucleotide
gatccctaattgttttcctattaatcgttttcccatga

SEQ ID NO: 1928 - DNA, 36 bp, Artificial Sequence
  Synthetic oligonucleotide
gatcgctcgccaggcacactgccgtttcgagtatta

SEQ ID NO: 1929 - DNA, 36 bp, Artificial Sequence
  Synthetic oligonucleotide
gcacgacgaacgagtccgggaggaccggcttcccca

SEQ ID NO: 1930 - DNA, 35 bp, Artificial Sequence
  Synthetic oligonucleotide
gatcttatccggcccacatctttaaccccaacact

SEQ ID NO: 1931 - DNA, 35 bp, Artificial Sequence
  Synthetic oligonucleotide
gccgtctcggggtaatcggcctaatacgtagacat

SEQ ID NO: 1932 - DNA, 37 bp, Artificial Sequence
  Synthetic oligonucleotide
gccgcggggggccggggaggtcccatcgaggttatga

SEQ ID NO: 1933 - DNA, 38 bp, Artificial Sequence
  Synthetic oligonucleotide
gctaacctttgttatactaggactttctccacaggtga

SEQ ID NO: 1934 - DNA, 35 bp, Artificial Sequence
  Synthetic oligonucleotide
ggggtttcttggagcgcaatacggtttgtttctga

SEQ ID NO: 1935 - DNA, 35 bp, Artificial Sequence
  Synthetic oligonucleotide
ggcgaaactagcctggattggagttagacctttca

SEQ ID NO: 1936 - DNA, 38 bp, Artificial Sequence
  Synthetic oligonucleotide
gggggagttgcatggttgcaactctggaggccctttga

SEQ ID NO: 1937 - DNA, 37 bp, Artificial Sequence
  Synthetic oligonucleotide
gggtttaacgtgcccacccgtcagggtagtcctacga

SEQ ID NO: 1938 - DNA, 35 bp, Artificial Sequence
  Synthetic oligonucleotide
gggtatgccgttctgtccgggccttatgcgcatat

SEQ ID NO: 1939 - DNA, 37 bp, Artificial Sequence
  Synthetic oligonucleotide
gggacaatagaattaaactcgggcttaggtcctcgga

SEQ ID NO: 1940 - DNA, 37 bp, Artificial Sequence
  Synthetic oligonucleotide
ggggagatggctgggtcttgataccggaaacttgcga

SEQ ID NO: 1941 - DNA, 38 bp, Artificial Sequence
  Synthetic oligonucleotide
ggcttgtatacctattatgttaggcaggtgccctttga

SEQ ID NO: 1942 - DNA, 36 bp, Artificial Sequence
  Synthetic oligonucleotide
gtggcccggttgtgttgtcacggacgtgcggtccca

SEQ ID NO: 1943 - DNA, 36 bp, Artificial Sequence
  Synthetic oligonucleotide
gtgttgtatgtcttcgcaatcctagccgaccgccaa

SEQ ID NO: 1944 - DNA, 38 bp, Artificial Sequence
  Synthetic oligonucleotide
gtgcgcgttggtgggccgcttgtaactataccctttga

SEQ ID NO: 1945 - DNA, 35 bp, Artificial Sequence
  Synthetic oligonucleotide
gttttggtggttcaaaccggtcgcccactggcatt

SEQ ID NO: 1946 - DNA, 36 bp, Artificial Sequence
  Synthetic oligonucleotide
tacatcccggctagatccgtgaggactggcggtgtc

SEQ ID NO: 1947 - DNA, 38 bp, Artificial Sequence
  Synthetic oligonucleotide
taaaagaactcttttcgtcaaccatacctcaggcctga

SEQ ID NO: 1948 - DNA, 37 bp, Artificial Sequence
  Synthetic oligonucleotide
tagtccatatatagcttaaactgatgcgggggttcga

SEQ ID NO: 1949 - DNA, 35 bp, Artificial Sequence
  Synthetic oligonucleotide
tacccttatcggcacccccacacttatggtaattc

SEQ ID NO: 1950 - DNA, 36 bp, Artificial Sequence
  Synthetic oligonucleotide
tacgggaatgggtttggccctaaaagccagacacga

SEQ ID NO: 1951 - DNA, 36 bp, Artificial Sequence
  Synthetic oligonucleotide
tagctaacggtcccaacaagcatgttgggattggca

SEQ ID NO: 1952 - DNA, 38 bp, Artificial Sequence
  Synthetic oligonucleotide
tacgccatgatacttacatctagccaccttttttttga

SEQ ID NO: 1953 - DNA, 36 bp, Artificial Sequence
  Synthetic oligonucleotide
tatatctggccaccggcgggggggctggtgatctta

SEQ ID NO: 1954 - DNA, 36 bp, Artificial Sequence; identical to SEQ ID NO: 1720
  Synthetic oligonucleotide

SEQ ID NO: 1955 - DNA, 38 bp, Artificial Sequence
  Synthetic oligonucleotide
tatcaaattcggtcgtagtatttgtcgccgtaacgtta

SEQ ID NO: 1956 - DNA, 38 bp, Artificial Sequence
  Synthetic oligonucleotide
tactagcgatcatttgttcgctttgggttggttattga

SEQ ID NO: 1957 - DNA, 35 bp, Artificial Sequence
  Synthetic oligonucleotide
taggtggtcgtgcctacattgactgtttccatcca

SEQ ID NO: 1958 - DNA, 35 bp, Artificial Sequence
  Synthetic oligonucleotide
tactccggcccaactatatacttctccacacctcc

SEQ ID NO: 1959 - DNA, 37 bp, Artificial Sequence
  Synthetic oligonucleotide
tatcacgacttcccaccttcttccgcctttgtcccaa

SEQ ID NO: 1960 - DNA, 37 bp, Artificial Sequence
  Synthetic oligonucleotide
tcacagggcctgaaggtagtagatattaaacgctgga

SEQ ID NO: 1961 - DNA, 35 bp, Artificial Sequence
  Synthetic oligonucleotide
tcattatacggatcccgcgccgaacctggccgact

SEQ ID NO: 1962 - DNA, 38 bp, Artificial Sequence
  Synthetic oligonucleotide
tcactttggtaaactattcccccgtttctctcctatga

SEQ ID NO: 1963 - DNA, 37 bp, Artificial Sequence
  Synthetic oligonucleotide
tcaatacgcgtccggaaatccccctgtgcaagctgga

SEQ ID NO: 1964 - DNA, 37 bp, Artificial Sequence
  Synthetic oligonucleotide
tcaatgcttgctgctcgtagctttcaaccgtggtgga

SEQ ID NO: 1965 - DNA, 35 bp, Artificial Sequence
  Synthetic oligonucleotide
tatcgtttgccatattccgccagagaaaagtctcc

SEQ ID NO: 1966 - DNA, 38 bp, Artificial Sequence
  Synthetic oligonucleotide
tcctcgtggcttaccggtatactcccccaactcattga

SEQ ID NO: 1967 - DNA, 37 bp, Artificial Sequence
  Synthetic oligonucleotide
tccctccccgttgcccttattccgtactcacttatga

SEQ ID NO: 1968 - DNA, 38 bp, Artificial Sequence
  Synthetic oligonucleotide
tcctgtctccgctaggtaacatccgaatactctcttga

SEQ ID NO: 1969 - DNA, 36 bp, Artificial Sequence
  Synthetic oligonucleotide
tcctcgaccatctacaaactttgaagccacacccca

SEQ ID NO: 1970 - DNA, 35 bp, Artificial Sequence; identical to SEQ ID NO: 1551
  Synthetic oligonucleotide

SEQ ID NO: 1971 - DNA, 38 bp, Artificial Sequence
  Synthetic oligonucleotide
tccactcaatccccggttcgtatgctctgtaccattga

SEQ ID NO: 1972 - DNA, 38 bp, Artificial Sequence
  Synthetic oligonucleotide
tcccgtcccacctttactttgctacttcaccatcttga

SEQ ID NO: 1973 - DNA, 38 bp, Artificial Sequence
  Synthetic oligonucleotide
tccttgcatacctcggctctcctttctctcacatttga

SEQ ID NO: 1974 - DNA, 37 bp, Artificial Sequence
  Synthetic oligonucleotide
tctcgtgcgcgatttctgttctagggtaggagaggga

SEQ ID NO: 1975 - DNA, 38 bp, Artificial Sequence
  Synthetic oligonucleotide
tcggctcatccaaaattacttgcgggtttcataaatga

SEQ ID NO: 1976 - DNA, 36 bp, Artificial Sequence
  Synthetic oligonucleotide
tctcgcacctttattttctccgctcttttgtttcca

SEQ ID NO: 1977 - DNA, 38 bp, Artificial Sequence
  Synthetic oligonucleotide
tcgctacaattggccttttctgtatttgggttctatga

SEQ ID NO: 1978 - DNA, 37 bp, Artificial Sequence
  Synthetic oligonucleotide
tgcacgccgagcaaggcggtactctaggacccacgga

SEQ ID NO: 1979 - DNA, 38 bp, Artificial Sequence
  Synthetic oligonucleotide
tgccgcttttaccacttgacttacgataagaaaactga

SEQ ID NO: 1980 - DNA, 37 bp, Artificial Sequence
  Synthetic oligonucleotide
tgagtttttctaaataccgcagcctcagccacgcgga

SEQ ID NO: 1981 - DNA, 34 bp, Artificial Sequence
  Synthetic oligonucleotide
tgccttttttttcaccggtttgattccgctttcg

SEQ ID NO: 1982 - DNA, 35 bp, Artificial Sequence
  Synthetic oligonucleotide
tgaaagccaggtattttggggctcctttttcctcc

SEQ ID NO: 1983 - DNA, 38 bp, Artificial Sequence
  Synthetic oligonucleotide
tgacctacaaagggtttgaaataaatcgctcgacgtga

SEQ ID NO: 1984 - DNA, 35 bp, Artificial Sequence
  Synthetic oligonucleotide
tggaaagttagatttcctggggtctcgctttgagt

SEQ ID NO: 1985 - DNA, 35 bp, Artificial Sequence
  Synthetic oligonucleotide
tgtacttacttttactcgatcaccttataatttcc

SEQ ID NO: 1986 - DNA, 38 bp, Artificial Sequence
  Synthetic oligonucleotide
tggcctattctcgtacaatttacttcttatcatcctga

SEQ ID NO: 1987 - DNA, 38 bp, Artificial Sequence
  Synthetic oligonucleotide
ttagtacgtgccgagccccgagccctagagacctgtga

SEQ ID NO: 1988 - DNA, 36 bp, Artificial Sequence; identical to SEQ ID NO: 1730
  Synthetic oligonucleotide

SEQ ID NO: 1989 - DNA, 35 bp, Artificial Sequence
  Synthetic oligonucleotide
tgttagttccactttccgataatccgtcttcctta

SEQ ID NO: 1990 - DNA, 36 bp, Artificial Sequence
  Synthetic oligonucleotide
tgttaggcctttatttaccttatcttaattgtttta

SEQ ID NO: 1991 - DNA, 38 bp, Artificial Sequence
  Synthetic oligonucleotide
tgtttttacacgcctactttttatctatctccacatga

SEQ ID NO: 1992 - DNA, 38 bp, Artificial Sequence
  Synthetic oligonucleotide
ttccccttttatttgcccgtaataatcgcttgacatga

SEQ ID NO: 1993 - DNA, 38 bp, Artificial Sequence
  Synthetic oligonucleotide
ttgaacctcggtagagccgtaaggcctatccggtttga

SEQ ID NO: 1994 - DNA, 37 bp, Artificial Sequence
  Synthetic oligonucleotide
ttcgacccttttccatacttcttctcacgcaaattga

SEQ ID NO: 1995 - DNA, 35 bp, Artificial Sequence
  Synthetic oligonucleotide
ttcttaatgtaaacttttgttgatactgtgccacc

SEQ ID NO: 1996 - DNA, 36 bp, Artificial Sequence
  Synthetic oligonucleotide
ttcccctctactcgcctattttcctcataaaattta

SEQ ID NO: 1997 - DNA, 35 bp, Artificial Sequence
  Synthetic oligonucleotide
ttcctcccccccgtgcaattttagaggtcccgtgg

SEQ ID NO: 1998 - DNA, 35 bp, Artificial Sequence
  Synthetic oligonucleotide
ttctcaccgtacatcccttacctatccccttttat

SEQ ID NO: 1999 - DNA, 38 bp, Artificial Sequence; identical to SEQ ID NO: 1804
  Synthetic oligonucleotide

SEQ ID NO: 2000 - DNA, 36 bp, Artificial Sequence
  Synthetic oligonucleotide
tttgcgaatctagctttcctgtatacatgacaataa

SEQ ID NO: 2001 - DNA, 35 bp, Artificial Sequence
  Synthetic oligonucleotide
ttggtctattatgctctatatgtgaagtgcgaaaa

SEQ ID NO: 2002 - DNA, 35 bp, Artificial Sequence
  Synthetic oligonucleotide
ttttagttccactttccgataatccgccttcctta

SEQ ID NO: 2003 - DNA, 35 bp, Artificial Sequence
  Synthetic oligonucleotide
ttttagtatacccaccgcgatactctcagtcttgc

SEQ ID NO: 2004 - DNA, 38 bp, Artificial Sequence
  Synthetic oligonucleotide
ttttggcgtgagctccaggtagtggttgaaacccatga

SEQ ID NO: 2005 - DNA, 37 bp, Artificial Sequence
  Synthetic oligonucleotide
agttcgccgttggaggctctttcgacatcatgctaga

SEQ ID NO: 2006 - DNA, 36 bp, Artificial Sequence; identical to SEQ ID NO: 1586
  Synthetic oligonucleotide

SEQ ID NO: 2007 - DNA, 35 bp, Artificial Sequence
  Synthetic oligonucleotide
aaagcgatcacgtttctttgggctgctgtctagca

SEQ ID NO: 2008 - DNA, 36 bp, Artificial Sequence
  Synthetic oligonucleotide
ccattaacggtaagacttaattccgtttggcgtgta

SEQ ID NO: 2009 - DNA, 37 bp, Artificial Sequence; identical to SEQ ID NO: 1587
  Synthetic oligonucleotide

SEQ ID NO: 2010 - DNA, 36 bp, Artificial Sequence
  Synthetic oligonucleotide
aatcgtactcacggtgacatccttggtttgatggta

SEQ ID NO: 2011 - DNA, 36 bp, Artificial Sequence; identical to SEQ ID NO: 1590
  Synthetic oligonucleotide

SEQ ID NO: 2012 - DNA, 38 bp, Artificial Sequence
  Synthetic oligonucleotide
gagttttactgccgtgtcaattatcggtcctgtgttga

SEQ ID NO: 2013 - DNA, 38 bp, Artificial Sequence
  Synthetic oligonucleotide
cgggacgaatcttagtttattccattcgcaagtgctga

SEQ ID NO: 2014 - DNA, 35 bp, Artificial Sequence
  Synthetic oligonucleotide
gatcataccgcgatatagacattgcaccgtttcta

SEQ ID NO: 2015 - DNA, 35 bp, Artificial Sequence; identical to SEQ ID NO: 1591
  Synthetic oligonucleotide

SEQ ID NO: 2016 - DNA, 38 bp, Artificial Sequence
  Synthetic oligonucleotide
agggacgaatcttagtttattccattcgcaagtgctga

SEQ ID NO: 2017 - DNA, 38 bp, Artificial Sequence
  Synthetic oligonucleotide
atcgcttaagttccgtaagggttaaggttcgttattga

SEQ ID NO: 2018 - DNA, 35 bp, Artificial Sequence
  Synthetic oligonucleotide
gagtacgcgcaatgacaatcgacttgttttcggtc

SEQ ID NO: 2019 - DNA, 37 bp, Artificial Sequence; identical to SEQ ID NO: 1595
  Synthetic oligonucleotide

SEQ ID NO: 2020 - DNA, 36 bp, Artificial Sequence
  Synthetic oligonucleotide
cctcagtttacgtactcatcttgaatgggggaaata

SEQ ID NO: 2021 - DNA, 38 bp, Artificial Sequence; identical to SEQ ID NO: 1596
  Synthetic oligonucleotide

SEQ ID NO: 2022 - DNA, 35 bp, Artificial Sequence; identical to SEQ ID NO: 1597
  Synthetic oligonucleotide

SEQ ID NO: 2023 - DNA, 38 bp, Artificial Sequence
  Synthetic oligonucleotide
agattaggttgctctgtcccgtgcttaagtatcgctga

SEQ ID NO: 2024 - DNA, 38 bp, Artificial Sequence
  Synthetic oligonucleotide
acattttccgcatgggacggaatgttcttcttcattga

SEQ ID NO: 2025 - DNA, 36 bp, Artificial Sequence; identical to SEQ ID NO: 1750
  Synthetic oligonucleotide

SEQ ID NO: 2026 - DNA, 36 bp, Artificial Sequence; identical to SEQ ID NO: 1598
  Synthetic oligonucleotide

SEQ ID NO: 2027 - DNA, 35 bp, Artificial Sequence; identical to SEQ ID NO: 1426
  Synthetic oligonucleotide

SEQ ID NO: 2028 - DNA, 35 bp, Artificial Sequence
  Synthetic oligonucleotide
tacctcatgtttgtcactatggaaatcatcccgcc

SEQ ID NO: 2029 - DNA, 35 bp, Artificial Sequence
  Synthetic oligonucleotide
tgcttctgcatgcaacgtgctctggactagctgtc

SEQ ID NO: 2030 - DNA, 35 bp, Artificial Sequence; identical to SEQ ID NO: 1599
  Synthetic oligonucleotide

SEQ ID NO: 2031 - DNA, 37 bp, Artificial Sequence; identical to SEQ ID NO: 1650
  Synthetic oligonucleotide

SEQ ID NO: 2032 - DNA, 36 bp, Artificial Sequence; identical to SEQ ID NO: 1638
  Synthetic oligonucleotide

SEQ ID NO: 2033 - DNA, 37 bp, Artificial Sequence; identical to SEQ ID NO: 1649
  Synthetic oligonucleotide

SEQ ID NO: 2034 - DNA, 38 bp, Artificial Sequence; identical to SEQ ID NO: 1601
  Synthetic oligonucleotide

SEQ ID NO: 2035 - DNA, 36 bp, Artificial Sequence; identical to SEQ ID NO: 1602
  Synthetic oligonucleotide

SEQ ID NO: 2036 - DNA, 36 bp, Artificial Sequence; identical to SEQ ID NO: 1603
  Synthetic oligonucleotide

SEQ ID NO: 2037 - DNA, 36 bp, Artificial Sequence
  Synthetic oligonucleotide
ttggcctttgagttagtgcctagatagcctgagtta

SEQ ID NO: 2038 - DNA, 36 bp, Artificial Sequence
  Synthetic oligonucleotide
tcattggttccgatccggggctctggacctgacata

SEQ ID NO: 2039 - DNA, 36 bp, Artificial Sequence; identical to SEQ ID NO: 1604
  Synthetic oligonucleotide

SEQ ID NO: 2040 - DNA, 35 bp, Artificial Sequence; identical to SEQ ID NO: 1605
  Synthetic oligonucleotide

SEQ ID NO: 2041 - DNA, 36 bp, Artificial Sequence
  Synthetic oligonucleotide
gcggagcgcttatataatggtgttgtaggtccatta

SEQ ID NO: 2042 - DNA, 35 bp, Artificial Sequence
  Synthetic oligonucleotide
gtacgccgctgccaataatgtctgttgttacattc

SEQ ID NO: 2043 - DNA, 36 bp, Artificial Sequence
  Synthetic oligonucleotide
tttaatggggagctacgtctcgaatcgattttggta

SEQ ID NO: 2044 - DNA, 35 bp, Artificial Sequence; identical to SEQ ID NO: 1606
  Synthetic oligonucleotide

SEQ ID NO: 2045 - DNA, 35 bp, Artificial Sequence
  Synthetic oligonucleotide
ttcccttgttcgagtttcccagcctggacgccctg

SEQ ID NO: 2046 - DNA, 36 bp, Artificial Sequence
  Synthetic oligonucleotide
tccctgtcggtccaaacgtaagggcgggctaaaaca

SEQ ID NO: 2047 - DNA, 36 bp, Artificial Sequence
  Synthetic oligonucleotide
gtctggctggaaaatcagggttgcctatgtttcaaa

SEQ ID NO: 2048 - DNA, 36 bp, Artificial Sequence
  Synthetic oligonucleotide
tacattccgggctgttcagcaatgtcgctccagtta

SEQ ID NO: 2049 - DNA, 38 bp, Artificial Sequence; identical to SEQ ID NO: 1609
  Synthetic oligonucleotide

SEQ ID NO: 2050 - DNA, 35 bp, Artificial Sequence
  Synthetic oligonucleotide
tttgcaagttcgctccgtatatccactgtgaagac

SEQ ID NO: 2051 - DNA, 35 bp, Artificial Sequence
  Synthetic oligonucleotide
tttgcaagttcgctccgtatatccactgtgaagcc

SEQ ID NO: 2052 - DNA, 36 bp, Artificial Sequence
  Synthetic oligonucleotide
tcctctccgtctgtgaagacgtgtgtggcggaatta

SEQ ID NO: 2053 - DNA, 35 bp, Artificial Sequence; identical to SEQ ID NO: 1644
  Synthetic oligonucleotide

SEQ ID NO: 2054 - DNA, 36 bp, Artificial Sequence; identical to SEQ ID NO: 1611
  Synthetic oligonucleotide

SEQ ID NO: 2055 - DNA, 37 bp, Artificial Sequence
  Synthetic oligonucleotide
aaccaaacctgtacccgaataaatcatccattaacga

SEQ ID NO: 2056 - DNA, 36 bp, Artificial Sequence
  Synthetic oligonucleotide
aacccaattcacatactctctcaccctcactaaaca

SEQ ID NO: 2057 - DNA, 37 bp, Artificial Sequence
  Synthetic oligonucleotide
aacaacctcgaatttgtataggttcgcatcactctga

SEQ ID NO: 2058 - DNA, 35 bp, Artificial Sequence
  Synthetic oligonucleotide
aactgtcatccgctgactaactcaatctaactcca

SEQ ID NO: 2059 - DNA, 38 bp, Artificial Sequence
  Synthetic oligonucleotide
acattaaggatttatcttcacccatttttgcctcttga

SEQ ID NO: 2060 - DNA, 38 bp, Artificial Sequence
  Synthetic oligonucleotide
acaaagtaacgtacctcagttccggtacttacgggtga

SEQ ID NO: 2061 - DNA, 35 bp, Artificial Sequence
  Synthetic oligonucleotide
accccacctgcacaccttcatctcatctattacat

SEQ ID NO: 2062 - DNA, 38 bp, Artificial Sequence; identical to SEQ ID NO: 2024
  Synthetic oligonucleotide

SEQ ID NO: 2063 - DNA, 37 bp, Artificial Sequence
  Synthetic oligonucleotide
acaattaatataaattccttacatcaatcctagacga

SEQ ID NO: 2064 - DNA, 38 bp, Artificial Sequence
  Synthetic oligonucleotide
acattcccgtggtggtccttacgggtgggccagcctga

SEQ ID NO: 2065 - DNA, 38 bp, Artificial Sequence; identical to SEQ ID NO: 1612
  Synthetic oligonucleotide

SEQ ID NO: 2066 - DNA, 35 bp, Artificial Sequence
  Synthetic oligonucleotide
accggactgcacagggatcccgataggagggtgac

SEQ ID NO: 2067 - DNA, 37 bp, Artificial Sequence
  Synthetic oligonucleotide
acccttgcaatcaatccccccttttacctgtacatga

SEQ ID NO: 2068 - DNA, 36 bp, Artificial Sequence
  Synthetic oligonucleotide
actcgcccttcacgactttatccaaatttactttca

SEQ ID NO: 2069 - DNA, 35 bp, Artificial Sequence
  Synthetic oligonucleotide
acgtctgccaaatctactcgcattcgatacacaca

SEQ ID NO: 2070 - DNA, 35 bp, Artificial Sequence
  Synthetic oligonucleotide
actactgggcgcactagcgcgaggctccactgaat

SEQ ID NO: 2071 - DNA, 38 bp, Artificial Sequence
  Synthetic oligonucleotide
actcacattcccaccccctattgcctttaaatacctga

SEQ ID NO: 2072 - DNA, 37 bp, Artificial Sequence
  Synthetic oligonucleotide
actgcagcatcaagccactaattggggcttgtatcga

SEQ ID NO: 2073 - DNA, 37 bp, Artificial Sequence
  Synthetic oligonucleotide
acggttggagcttgtgggaaactaggttgggttcgga

SEQ ID NO: 2074 - DNA, 35 bp, Artificial Sequence; identical to SEQ ID NO: 1597
  Synthetic oligonucleotide

SEQ ID NO: 2075 - DNA, 35 bp, Artificial Sequence
  Synthetic oligonucleotide
agcacccacccgcttctattcctcgatcatacact

SEQ ID NO: 2076 - DNA, 35 bp, Artificial Sequence; identical to SEQ ID NO: 1591
  Synthetic oligonucleotide

SEQ ID NO: 2077 - DNA, 36 bp, Artificial Sequence; identical to SEQ ID NO: 1590
  Synthetic oligonucleotide

SEQ ID NO: 2078 - DNA, 35 bp, Artificial Sequence
  Synthetic oligonucleotide
agattgctccgcagtacggtgtagggcgataaaaa

SEQ ID NO: 2079 - DNA, 35 bp, Artificial Sequence
  Synthetic oligonucleotide
agccgcccctttagacagaggttacgacttgcgta

SEQ ID NO: 2080 - DNA, 38 bp, Artificial Sequence
  Synthetic oligonucleotide
actttggggctttctcggtcttcgcactatggtactga

SEQ ID NO: 2081 - DNA, 36 bp, Artificial Sequence; identical to SEQ ID NO: 1617
  Synthetic oligonucleotide

SEQ ID NO: 2082 - DNA, 36 bp, Artificial Sequence
  Synthetic oligonucleotide
agaaccccattctcattccaccagttactacgctta

SEQ ID NO: 2083 - DNA, 36 bp, Artificial Sequence
  Synthetic oligonucleotide
aggtatacaaatgtgtagtctagtcctgccgatcga

SEQ ID NO: 2084 - DNA, 36 bp, Artificial Sequence; identical to SEQ ID NO: 1586
  Synthetic oligonucleotide

SEQ ID NO: 2085 - DNA, 36 bp, Artificial Sequence
  Synthetic oligonucleotide
agggattcgccctgtgtcacgctcaaactgtagtaa

SEQ ID NO: 2086 - DNA, 38 bp, Artificial Sequence
  Synthetic oligonucleotide
agtaatccccggcgtataatttcagtcctgtggtttga

SEQ ID NO: 2087 - DNA, 35 bp, Artificial Sequence
  Synthetic oligonucleotide
agttgatgcagtgggacctgagattaggcttatga

SEQ ID NO: 2088 - DNA, 36 bp, Artificial Sequence
  Synthetic oligonucleotide
agtattcctctggtagtatttttccttaattccgta

SEQ ID NO: 2089 - DNA, 35 bp, Artificial Sequence; identical to SEQ ID NO: 1620
  Synthetic oligonucleotide

SEQ ID NO: 2090 - DNA, 35 bp, Artificial Sequence
  Synthetic oligonucleotide
agtacctcttgtgggtcttggggctgccactgcct

SEQ ID NO: 2091 - DNA, 36 bp, Artificial Sequence
  Synthetic oligonucleotide
atcaccgtccttatcataaccagttcgttttttata

SEQ ID NO: 2092 - DNA, 36 bp, Artificial Sequence
  Synthetic oligonucleotide
atgcttccatctctgttttttaaccccttaccgtta

SEQ ID NO: 2093 - DNA, 35 bp, Artificial Sequence; identical to SEQ ID NO: 1594
  Synthetic oligonucleotide

SEQ ID NO: 2094 - DNA, 37 bp, Artificial Sequence
  Synthetic oligonucleotide
caccctaatcaccgctaaccttaccataacaatttga

SEQ ID NO: 2095 - DNA, 37 bp, Artificial Sequence
  Synthetic oligonucleotide
cagccgctctagttacaggtttactgcggctaaacga

SEQ ID NO: 2096 - DNA, 35 bp, Artificial Sequence
  Synthetic oligonucleotide
cacagtatccttgtacagattttgatggttgttgg

SEQ ID NO: 2097 - DNA, 35 bp, Artificial Sequence
  Synthetic oligonucleotide
catcggggtacgcttcctttaaaagatcctgtgcc

SEQ ID NO: 2098 - DNA, 36 bp, Artificial Sequence
  Synthetic oligonucleotide
attcatggtgccgtgagaaaataaccatgtacgcaa

SEQ ID NO: 2099 - DNA, 35 bp, Artificial Sequence
  Synthetic oligonucleotide
atttccataccattgtaggccttctcgtatcgtaa

SEQ ID NO: 2100 - DNA, 38 bp, Artificial Sequence
  Synthetic oligonucleotide
cccatagggcactttttacacccctcgcatactattga

SEQ ID NO: 2101 - DNA, 37 bp, Artificial Sequence
  Synthetic oligonucleotide
ccgtgatgcagatgaatgtacggacgtctgccggtga

SEQ ID NO: 2102 - DNA, 38 bp, Artificial Sequence
  Synthetic oligonucleotide
cccaccgagggcaggtggtgacgtttccccagccttga

SEQ ID NO: 2103 - DNA, 38 bp, Artificial Sequence
  Synthetic oligonucleotide
cccagacaactaccgcggagtagcggaagccgtactga

SEQ ID NO: 2104 - DNA, 36 bp, Artificial Sequence
  Synthetic oligonucleotide
ccgcgcatcacattgggctctgggatgcccgctgca

SEQ ID NO: 2105 - DNA, 35 bp, Artificial Sequence
  Synthetic oligonucleotide
cctagaccacgtgtgtgtcccgggtagggaagtct

SEQ ID NO: 2106 - DNA, 37 bp, Artificial Sequence; identical to SEQ ID NO: 1587
  Synthetic oligonucleotide

SEQ ID NO: 2107 - DNA, 36 bp, Artificial Sequence; identical to SEQ ID NO: 2008
  Synthetic oligonucleotide

SEQ ID NO: 2108 - DNA, 37 bp, Artificial Sequence
  Synthetic oligonucleotide
ccccaccgcgcacaccccgaactttacatatgcatga

SEQ ID NO: 2109 - DNA, 38 bp, Artificial Sequence
  Synthetic oligonucleotide
ccacacccattttgactgaacagcctatccggtactga

SEQ ID NO: 2110 - DNA, 36 bp, Artificial Sequence
  Synthetic oligonucleotide
cctgttcaattcatcctccaggttcgtgttacccta

SEQ ID NO: 2111 - DNA, 36 bp, Artificial Sequence
  Synthetic oligonucleotide
cctttcggactagcttctggcccatttggcgccata

SEQ ID NO: 2112 - DNA, 35 bp, Artificial Sequence
  Synthetic oligonucleotide
ctacaattagaagctcggtttcttctgcggtgacg

SEQ ID NO: 2113 - DNA, 38 bp, Artificial Sequence; identical to SEQ ID NO: 1596
  Synthetic oligonucleotide

SEQ ID NO: 2114 - DNA, 35 bp, Artificial Sequence
  Synthetic oligonucleotide
cgcgggggcctatatgctgtttccaccgctagtta

SEQ ID NO: 2115 - DNA, 35 bp, Artificial Sequence
  Synthetic oligonucleotide
cgctggctgcacgcacgcctgggcgcactgcccta

SEQ ID NO: 2116 - DNA, 35 bp, Artificial Sequence
  Synthetic oligonucleotide
cgtataggttaatacgtactggagcccggagggga

SEQ ID NO: 2117 - DNA, 37 bp, Artificial Sequence
  Synthetic oligonucleotide
cctgaatgggcggtccgcacttcgttagtatcccaga

SEQ ID NO: 2118 - DNA, 35 bp, Artificial Sequence
  Synthetic oligonucleotide
ctcaacgtagtctgcggagttactccagaatgacg

SEQ ID NO: 2119 - DNA, 38 bp, Artificial Sequence
  Synthetic oligonucleotide
gaacttcgcggtgactcgtgcccttcgttgtcctttga

SEQ ID NO: 2120 - DNA, 35 bp, Artificial Sequence
  Synthetic oligonucleotide
gaaccatcattggcttcatttagctattctacacc

SEQ ID NO: 2121 - DNA, 38 bp, Artificial Sequence
  Synthetic oligonucleotide
ctgtccttaaatggaaggtcattttggctcaggtctga

SEQ ID NO: 2122 - DNA, 37 bp, Artificial Sequence
  Synthetic oligonucleotide
gacacgggggcaaaggtggtttgtgtaccccgtacga

SEQ ID NO: 2123 - DNA, 37 bp, Artificial Sequence
  Synthetic oligonucleotide
gaaggtcatcggactgttctgtcaatccccctttgga

SEQ ID NO: 2124 - DNA, 35 bp, Artificial Sequence
  Synthetic oligonucleotide
gagctcaaatcggggactactgcattgtctactcg

SEQ ID NO: 2125 - DNA, 37 bp, Artificial Sequence; identical to SEQ ID NO: 1595
  Synthetic oligonucleotide

SEQ ID NO: 2126 - DNA, 38 bp, Artificial Sequence
  Synthetic oligonucleotide
gacgccttgaaagcgacgcctgatactcgggggcctga

SEQ ID NO: 2127 - DNA, 37 bp, Artificial Sequence
  Synthetic oligonucleotide
gagggccccaagtcaccgctgtagttctaggcccaga

SEQ ID NO: 2128 - DNA, 35 bp, Artificial Sequence
  Synthetic oligonucleotide
gacggtcgtactggagcatcctgagactgttcgag

SEQ ID NO: 2129 - DNA, 37 bp, Artificial Sequence; identical to SEQ ID NO: 1767
  Synthetic oligonucleotide

SEQ ID NO: 2130 - DNA, 35 bp, Artificial Sequence
  Synthetic oligonucleotide
gagtacaggtccggcgccctatcgagaaaggaaaa

SEQ ID NO: 2131 - DNA, 38 bp, Artificial Sequence
  Synthetic oligonucleotide
gagtactgccatgaggccagaggtaagaagccgaatga

SEQ ID NO: 2132 - DNA, 35 bp, Artificial Sequence
  Synthetic oligonucleotide
gagtacagttggattccgcccttgtatctgtacga

SEQ ID NO: 2133 - DNA, 37 bp, Artificial Sequence
  Synthetic oligonucleotide
gagtacctacccgtcgaatattgagattcgggaacga

SEQ ID NO: 2134 - DNA, 35 bp, Artificial Sequence
  Synthetic oligonucleotide
gagtctcatacccctgaatatgtttttatgctttc

SEQ ID NO: 2135 - DNA, 36 bp, Artificial Sequence
  Synthetic oligonucleotide
gagtggctcaaccagggtccagaattacaaaaaata

SEQ ID NO: 2136 - DNA, 36 bp, Artificial Sequence
  Synthetic oligonucleotide
gcaatgtcccctgttttctactaactctgatcttga

SEQ ID NO: 2137 - DNA, 36 bp, Artificial Sequence
  Synthetic oligonucleotide
gcagttctaaaggtggaagaatccaaatgacccaga

SEQ ID NO: 2138 - DNA, 35 bp, Artificial Sequence
  Synthetic oligonucleotide
gcaccttctcctttaattcccagccaataaccatc

SEQ ID NO: 2139 - DNA, 36 bp, Artificial Sequence
  Synthetic oligonucleotide
gatgtaacgggtctgcggggagtttgtcatgcggga

SEQ ID NO: 2140 - DNA, 35 bp, Artificial Sequence
  Synthetic oligonucleotide
gccatcatattcattattccatgcctccccatccc

SEQ ID NO: 2141 - DNA, 35 bp, Artificial Sequence; identical to SEQ ID NO: 2014
  Synthetic oligonucleotide

SEQ ID NO: 2142 - DNA, 36 bp, Artificial Sequence
  Synthetic oligonucleotide
gcaatgaacacctacacatacctgccttcacgatta

SEQ ID NO: 2143 - DNA, 36 bp, Artificial Sequence
  Synthetic oligonucleotide
gccctcacttcaacgtttcataactctacattaata

SEQ ID NO: 2144 - DNA, 38 bp, Artificial Sequence
  Synthetic oligonucleotide
gcgccgatggggcatcggtcgcgacagtcccgccgtga

SEQ ID NO: 2145 - DNA, 36 bp, Artificial Sequence
  Synthetic oligonucleotide
gcgttccccttggacaatatcactttcttatcgtaa

SEQ ID NO: 2146 - DNA, 35 bp, Artificial Sequence; identical to SEQ ID NO: 1600
  Synthetic oligonucleotide

SEQ ID NO: 2147 - DNA, 36 bp, Artificial Sequence
  Synthetic oligonucleotide
gcctctgccaagcaattcatcttaacgacctctcta

SEQ ID NO: 2148 - DNA, 35 bp, Artificial Sequence
  Synthetic oligonucleotide
gccgccggagcacggctgtctttatacgcactgta

SEQ ID NO: 2149 - DNA, 36 bp, Artificial Sequence; identical to SEQ ID NO: 2041
  Synthetic oligonucleotide

SEQ ID NO: 2150 - DNA, 38 bp, Artificial Sequence
  Synthetic oligonucleotide
gcgtacatagatctaggctttccatccaggatatgtga

SEQ ID NO: 2151 - DNA, 36 bp, Artificial Sequence
  Synthetic oligonucleotide
gcgccggcatactccttatattccactatccctgta

SEQ ID NO: 2152 - DNA, 38 bp, Artificial Sequence
  Synthetic oligonucleotide
gctaacgtactctttttttcaacttcactgactattga

SEQ ID NO: 2153 - DNA, 38 bp, Artificial Sequence
  Synthetic oligonucleotide
gctcccgaattgttttcctattaatcgttttcccatga

SEQ ID NO: 2154 - DNA, 36 bp, Artificial Sequence
  Synthetic oligonucleotide
gctgaacaggtcacggtcccccccacacgttaacta

SEQ ID NO: 2155 - DNA, 37 bp, Artificial Sequence
  Synthetic oligonucleotide
gctatacgactgcaagggtctgaccgcagggaattga

SEQ ID NO: 2156 - DNA, 36 bp, Artificial Sequence
  Synthetic oligonucleotide
gcttccgtatcaagagtggctcgcacccacagagta

SEQ ID NO: 2157 - DNA, 35 bp, Artificial Sequence
  Synthetic oligonucleotide
ggattacgtacccgactttttttctggttttcttt

SEQ ID NO: 2158 - DNA, 36 bp, Artificial Sequence
  Synthetic oligonucleotide
gggaccggaccctgtccttggtcgtttgatccacga

SEQ ID NO: 2159 - DNA, 38 bp, Artificial Sequence
  Synthetic oligonucleotide
ggtatttttttgtgctaatctcgccgaatcgtacctga

SEQ ID NO: 2160 - DNA, 36 bp, Artificial Sequence
  Synthetic oligonucleotide
ggctcaccgactccttactttgctggtactacctta

SEQ ID NO: 2161 - DNA, 37 bp, Artificial Sequence
  Synthetic oligonucleotide
gggaacgtaaggttttggtgaacagagggtagtaaga

SEQ ID NO: 2162 - DNA, 38 bp, Artificial Sequence
  Synthetic oligonucleotide
ggtgcttgtccctgtctctacgtaacttttgaagttga

SEQ ID NO: 2163 - DNA, 38 bp, Artificial Sequence; identical to SEQ ID NO: 1601
  Synthetic oligonucleotide

SEQ ID NO: 2164 - DNA, 35 bp, Artificial Sequence
  Synthetic oligonucleotide
ggggtccttttccatcacacatgtccagttccgta

SEQ ID NO: 2165 - DNA, 35 bp, Artificial Sequence
  Synthetic oligonucleotide
ggccttcttaccgactggggcttcgggttttacgt

SEQ ID NO: 2166 - DNA, 37 bp, Artificial Sequence
  Synthetic oligonucleotide
gtgggcccgcattgaaaccgcattcgtagagcctgga

SEQ ID NO: 2167 - DNA, 35 bp, Artificial Sequence; identical to SEQ ID NO: 2042
  Synthetic oligonucleotide

SEQ ID NO: 2168 - DNA, 37 bp, Artificial Sequence
  Synthetic oligonucleotide
gtacttgccgggttacgcagcgcgtccctcttcgcga

SEQ ID NO: 2169 - DNA, 37 bp, Artificial Sequence
  Synthetic oligonucleotide
gtgagctttacgtaatgcggtagttcgtactaacgga

SEQ ID NO: 2170 - DNA, 36 bp, Artificial Sequence; identical to SEQ ID NO: 1598
  Synthetic oligonucleotide

SEQ ID NO: 2171 - DNA, 38 bp, Artificial Sequence
  Synthetic oligonucleotide
gtcgcctatcccagtgcttcgaggggcgacgtgtctga

SEQ ID NO: 2172 - DNA, 37 bp, Artificial Sequence
  Synthetic oligonucleotide
gtgtacatttccgcgcaagctactcagttttttttga

SEQ ID NO: 2173 - DNA, 35 bp, Artificial Sequence
  Synthetic oligonucleotide
gtttactcctgtaccgtgaggtgaagggaaagcaa

SEQ ID NO: 2174 - DNA, 36 bp, Artificial Sequence; identical to SEQ ID NO: 2048
  Synthetic oligonucleotide

SEQ ID NO: 2175 - DNA, 37 bp, Artificial Sequence
  Synthetic oligonucleotide
gttttttactatggttcatctaggattccagtttaga

SEQ ID NO: 2176 - DNA, 36 bp, Artificial Sequence
  Synthetic oligonucleotide
gttctttcacggacggcctcctttccgatctattca

SEQ ID NO: 2177 - DNA, 36 bp, Artificial Sequence; identical to SEQ ID NO: 1602
  Synthetic oligonucleotide

SEQ ID NO: 2178 - DNA, 37 bp, Artificial Sequence
  Synthetic oligonucleotide
gttccgggctctttgtgtagtggtgagcacggcacga

SEQ ID NO: 2179 - DNA, 37 bp, Artificial Sequence
  Synthetic oligonucleotide
taaatgcccggttcattgaatcttcacaaagatggga

SEQ ID NO: 2180 - DNA, 36 bp, Artificial Sequence; identical to SEQ ID NO: 1603
  Synthetic oligonucleotide

SEQ ID NO: 2181 - DNA, 38 bp, Artificial Sequence
  Synthetic oligonucleotide
tacaccatgatacttacatctagcaaccttttttttga

SEQ ID NO: 2182 - DNA, 35 bp, Artificial Sequence
  Synthetic oligonucleotide
taaccgttcgctgggttccagtcccttgttaagcc

SEQ ID NO: 2183 - DNA, 36 bp, Artificial Sequence
  Synthetic oligonucleotide
tagtgttaaacgtgagtgcacttaatcaccctggta

SEQ ID NO: 2184 - DNA, 36 bp, Artificial Sequence
  Synthetic oligonucleotide
taccttgacctgcatcggttctcttcataatcctaa

SEQ ID NO: 2185 - DNA, 38 bp, Artificial Sequence
  Synthetic oligonucleotide
tagtcctgcactgttttacagttcttggtaatatttga

SEQ ID NO: 2186 - DNA, 35 bp, Artificial Sequence
  Synthetic oligonucleotide
tacttcaacacctcgctcgttacataccaatttct

SEQ ID NO: 2187 - DNA, 36 bp, Artificial Sequence; identical to SEQ ID NO: 1638
  Synthetic oligonucleotide

SEQ ID NO: 2188 - DNA, 35 bp, Artificial Sequence
  Synthetic oligonucleotide
tcatcgtcgcgtggccggtaggctgggaaatcctg

SEQ ID NO: 2189 - DNA, 37 bp, Artificial Sequence
  Synthetic oligonucleotide
tcacggatgcgaatcaaatgaactacctaagtccgga

SEQ ID NO: 2190 - DNA, 36 bp, Artificial Sequence; identical to SEQ ID NO: 2038
  Synthetic oligonucleotide

SEQ ID NO: 2191 - DNA, 35 bp, Artificial Sequence; identical to SEQ ID NO: 1777
  Synthetic oligonucleotide

SEQ ID NO: 2192 - DNA, 37 bp, Artificial Sequence
  Synthetic oligonucleotide
tccagccacatggatgaacagtgggccttttcacgga

SEQ ID NO: 2193 - DNA, 37 bp, Artificial Sequence; identical to SEQ ID NO: 1639
  Synthetic oligonucleotide

SEQ ID NO: 2194 - DNA, 38 bp, Artificial Sequence
  Synthetic oligonucleotide
tccttccgacgataacttacgtgtgacacgcgtactga

SEQ ID NO: 2195 - DNA, 38 bp, Artificial Sequence; identical to SEQ ID NO: 1608
  Synthetic oligonucleotide

SEQ ID NO: 2196 - DNA, 38 bp, Artificial Sequence
  Synthetic oligonucleotide
tcccgagtttgtcgatctcgagtggggcccttacctga

SEQ ID NO: 2197 - DNA, 36 bp, Artificial Sequence
  Synthetic oligonucleotide
tccctgtaacagggtctctctctttatatattctca

SEQ ID NO: 2198 - DNA, 37 bp, Artificial Sequence
  Synthetic oligonucleotide
tcgttcctcctttcgggtccgtgaggatccggaacga

SEQ ID NO: 2199 - DNA, 36 bp, Artificial Sequence; identical to SEQ ID NO: 1604
  Synthetic oligonucleotide

SEQ ID NO: 2200 - DNA, 37 bp, Artificial Sequence
  Synthetic oligonucleotide
tctcctttccaacgggacgctgtgttcccctcagtga

SEQ ID NO: 2201 - DNA, 35 bp, Artificial Sequence
  Synthetic oligonucleotide
tctgcactaccgtgaggtatggtgataggtggcga

SEQ ID NO: 2202 - DNA, 36 bp, Artificial Sequence
  Synthetic oligonucleotide
tcgggccagatcgcattcgtagttgctgtttccgta

SEQ ID NO: 2203 - DNA, 37 bp, Artificial Sequence
  Synthetic oligonucleotide
tgcacttaattccacttttccacccttttcactttga

SEQ ID NO: 2204 - DNA, 37 bp, Artificial Sequence
  Synthetic oligonucleotide
tgcacataattccacctttccacccttttcactttga

SEQ ID NO: 2205 - DNA, 38 bp, Artificial Sequence
  Synthetic oligonucleotide
tgagcatcttcacacgcatggctccacctcataaatga

SEQ ID NO: 2206 - DNA, 36 bp, Artificial Sequence; identical to SEQ ID NO: 1750
  Synthetic oligonucleotide

SEQ ID NO: 2207 - DNA, 37 bp, Artificial Sequence
  Synthetic oligonucleotide
tggtctgcacacgcacgtcgcctcttggggttatgga

SEQ ID NO: 2208 - DNA, 38 bp, Artificial Sequence
  Synthetic oligonucleotide
tgtagttttgcaatctatgggctaggaccatgtcatga

SEQ ID NO: 2209 - DNA, 37 bp, Artificial Sequence
  Synthetic oligonucleotide
tgctgttctcctggcgataggagattagccggacgga

SEQ ID NO: 2210 - DNA, 36 bp, Artificial Sequence
  Synthetic oligonucleotide
tgctaagagggctaaggccacacacttaataactta

SEQ ID NO: 2211 - DNA, 35 bp, Artificial Sequence; identical to SEQ ID NO: 2029
  Synthetic oligonucleotide

SEQ ID NO: 2212 - DNA, 38 bp, Artificial Sequence; identical to SEQ ID NO: 1609
  Synthetic oligonucleotide

SEQ ID NO: 2213 - DNA, 36 bp, Artificial Sequence
  Synthetic oligonucleotide
tggagtactagttccgaggacgtgagggaagactcg

SEQ ID NO: 2214 - DNA, 35 bp, Artificial Sequence
  Synthetic oligonucleotide
tggtccctggttccacttcattgagagcagagcat

SEQ ID NO: 2215 - DNA, 36 bp, Artificial Sequence
  Synthetic oligonucleotide
tgctcggatcttcgattcgtgccgcctgacaaatca

SEQ ID NO: 2216 - DNA, 35 bp, Artificial Sequence; identical to SEQ ID NO: 1644
  Synthetic oligonucleotide

SEQ ID NO: 2217 - DNA, 38 bp, Artificial Sequence
  Synthetic oligonucleotide
ttacgatgctcaagggtcccgttcgttcacagatatga

SEQ ID NO: 2218 - DNA, 38 bp, Artificial Sequence
  Synthetic oligonucleotide
ttacaaaccccggtgctctaaagttatcgatctcttga

SEQ ID NO: 2219 - DNA, 35 bp, Artificial Sequence
  Synthetic oligonucleotide
tgttggggggttagcacgggtttatgggttgcttc

SEQ ID NO: 2220 - DNA, 35 bp, Artificial Sequence
  Synthetic oligonucleotide
ttgcagtggagtaagccctgaccgaggagcgacga

SEQ ID NO: 2221 - DNA, 36 bp, Artificial Sequence
  Synthetic oligonucleotide
ttctcgcctacatctatctcaatattgtcctaccga

SEQ ID NO: 2222 - DNA, 36 bp, Artificial Sequence
  Synthetic oligonucleotide
ttgacatgcgatgtgcacagttagttaatttcaaca

SEQ ID NO: 2223 - DNA, 37 bp, Artificial Sequence
  Synthetic oligonucleotide
ttctatttactaaatacaacctttgtagcagacaaga

SEQ ID NO: 2224 - DNA, 36 bp, Artificial Sequence
  Synthetic oligonucleotide
ttccacacttcactgtacccactcttaccagccaca

SEQ ID NO: 2225 - DNA, 36 bp, Artificial Sequence
  Synthetic oligonucleotide
ttcctctagcctccgactggcgtgtgactctaaaga

SEQ ID NO: 2226 - DNA, 35 bp, Artificial Sequence
  Synthetic oligonucleotide
tttccgctatagtgcttctggtacgacgcgtacgg

SEQ ID NO: 2227 - DNA, 38 bp, Artificial Sequence
  Synthetic oligonucleotide
tttatactcatacccgaactgttccacaccgcaactga

SEQ ID NO: 2228 - DNA, 38 bp, Artificial Sequence
  Synthetic oligonucleotide
tttattcgccctttgttgacctacaccacatcacttga

SEQ ID NO: 2229 - DNA, 35 bp, Artificial Sequence; identical to SEQ ID NO: 1605
  Synthetic oligonucleotide

SEQ ID NO: 2230 - DNA, 38 bp, Artificial Sequence
  Synthetic oligonucleotide
ttgtagtttggccctttcgagggccgttgcctggttga

SEQ ID NO: 2231 - DNA, 38 bp, Artificial Sequence
  Synthetic oligonucleotide
tttttgttccataggtacggtctccggaggaatcgtga

SEQ ID NO: 2232 - DNA, 38 bp, Artificial Sequence
  Synthetic oligonucleotide
ttttgctaacgcgacggaggcgccgagagctatgctga

SEQ ID NO: 2233 - DNA, 35 bp, Artificial Sequence; identical to SEQ ID NO: 1599
  Synthetic oligonucleotide

SEQ ID NO: 2234 - DNA, 37 bp, Artificial Sequence; identical to SEQ ID NO: 1649
  Synthetic oligonucleotide

SEQ ID NO: 2235 - DNA, 36 bp, Artificial Sequence; identical to SEQ ID NO: 1651
  Synthetic oligonucleotide

SEQ ID NO: 2236 - DNA, 36 bp, Artificial Sequence; identical to SEQ ID NO: 1652
  Synthetic oligonucleotide

SEQ ID NO: 2237 - DNA, 37 bp, Artificial Sequence
  Synthetic oligonucleotide
aacgcctaactggacagaaaaatcgtacgctaccaga

SEQ ID NO: 2238 - DNA, 38 bp, Artificial Sequence; identical to SEQ ID NO: 1653
  Synthetic oligonucleotide

SEQ ID NO: 2239 - DNA, 38 bp, Artificial Sequence; identical to SEQ ID NO: 1792
  Synthetic oligonucleotide

SEQ ID NO: 2240 - DNA, 35 bp, Artificial Sequence
  Synthetic oligonucleotide
tggactggtcgtggggtgtgaacgaatccaatgtg

SEQ ID NO: 2241 - DNA, 38 bp, Artificial Sequence; identical to SEQ ID NO: 1731
  Synthetic oligonucleotide

SEQ ID NO: 2242 - DNA, 36 bp, Artificial Sequence
  Synthetic oligonucleotide
tgcaccctacccatttagatgtatcagccacgggca

SEQ ID NO: 2243 - DNA, 36 bp, Artificial Sequence
  Synthetic oligonucleotide
aacccgtagtagcacaccctgtctaacccaaatcaa

SEQ ID NO: 2244 - DNA, 35 bp, Artificial Sequence
  Synthetic oligonucleotide
aaacgcgatcttacatcattacaatccctcaaccc

SEQ ID NO: 2245 - DNA, 35 bp, Artificial Sequence
  Synthetic oligonucleotide
aaatcccatcgagcccttaacccagaccaactacg

SEQ ID NO: 2246 - DNA, 38 bp, Artificial Sequence
  Synthetic oligonucleotide
aagaacatgagactgaatatcgtacgcgagtaaaatga

SEQ ID NO: 2247 - DNA, 35 bp, Artificial Sequence
  Synthetic oligonucleotide
aagagtataggtccgagggaggacctactaattac

SEQ ID NO: 2248 - DNA, 38 bp, Artificial Sequence
  Synthetic oligonucleotide
aatttcggttacaccccgctctctatcactatacgtga

SEQ ID NO: 2249 - DNA, 37 bp, Artificial Sequence
  Synthetic oligonucleotide
accactagagtcctcaagaactcatccacccacctga

SEQ ID NO: 2250 - DNA, 35 bp, Artificial Sequence
  Synthetic oligonucleotide
acggtatttgttttttcgattgatggggaagtata

SEQ ID NO: 2251 - DNA, 37 bp, Artificial Sequence
  Synthetic oligonucleotide
accggcgaataacgccaaagcctgcgactggccttga

SEQ ID NO: 2252 - DNA, 35 bp, Artificial Sequence
  Synthetic oligonucleotide
acgcttttaaaaccatacactcgataactataccc

SEQ ID NO: 2253 - DNA, 36 bp, Artificial Sequence
  Synthetic oligonucleotide
accctactattaacccatcaaaagttcgctacccta

SEQ ID NO: 2254 - DNA, 36 bp, Artificial Sequence
  Synthetic oligonucleotide
acgcccatcgtttcgggcctttgtccatttcataca

SEQ ID NO: 2255 - DNA, 35 bp, Artificial Sequence
  Synthetic oligonucleotide
accttcccttcaacgggtgtattccggcgggtagc

SEQ ID NO: 2256 - DNA, 36 bp, Artificial Sequence
  Synthetic oligonucleotide
acttcacccacacaataccatcatcgataactcaaa

SEQ ID NO: 2257 - DNA, 35 bp, Artificial Sequence
  Synthetic oligonucleotide
agcggctaatcactgaagtagccccaggttttgaa

SEQ ID NO: 2258 - DNA, 37 bp, Artificial Sequence
  Synthetic oligonucleotide
agcaggcccaacggcctctgggttagtatccgcgtga

SEQ ID NO: 2259 - DNA, 36 bp, Artificial Sequence
  Synthetic oligonucleotide
agccgatccttgtccccgttgaaggccggatcgaaa

SEQ ID NO: 2260 - DNA, 38 bp, Artificial Sequence
  Synthetic oligonucleotide
aggcatctcaagcgctcggaggtacgcactatttctga

SEQ ID NO: 2261 - DNA, 35 bp, Artificial Sequence
  Synthetic oligonucleotide
agagacggcttcaacgcggctttcgggctctcttc

SEQ ID NO: 2262 - DNA, 35 bp, Artificial Sequence
  Synthetic oligonucleotide
agtacccccttatccctggggcctcccggggtacc

SEQ ID NO: 2263 - DNA, 36 bp, Artificial Sequence
  Synthetic oligonucleotide
atcaacaccattccctatatccaacactaaacgtaa

SEQ ID NO: 2264 - DNA, 37 bp, Artificial Sequence
  Synthetic oligonucleotide
agtttctcgacaggggcactctggccacgtggctgga

SEQ ID NO: 2265 - DNA, 35 bp, Artificial Sequence
  Synthetic oligonucleotide
aggggatactcagaacccgatgtaaatcttaagaa

SEQ ID NO: 2266 - DNA, 37 bp, Artificial Sequence
  Synthetic oligonucleotide
atcttcccaccacttgtgccttatcattgccccccga

SEQ ID NO: 2267 - DNA, 35 bp, Artificial Sequence; identical to SEQ ID NO: 1892
  Synthetic oligonucleotide

SEQ ID NO: 2268 - DNA, 35 bp, Artificial Sequence
  Synthetic oligonucleotide
ccagctagaccagacgaatgtggaactgaatctgc

SEQ ID NO: 2269 - DNA, 35 bp, Artificial Sequence
  Synthetic oligonucleotide
ccctaaaagcgacccactcagcggatttgacttgc

SEQ ID NO: 2270 - DNA, 35 bp, Artificial Sequence
  Synthetic oligonucleotide
ccaccccaccgagaggggctcatggcatacgctga

SEQ ID NO: 2271 - DNA, 36 bp, Artificial Sequence
  Synthetic oligonucleotide
cccgggaacacggtccgttcgtaggagaacgaccaa

SEQ ID NO: 2272 - DNA, 38 bp, Artificial Sequence
  Synthetic oligonucleotide
ccatgctctccggaggccgttttacggagggagcgtga

SEQ ID NO: 2273 - DNA, 36 bp, Artificial Sequence; identical to SEQ ID NO: 1651
  Synthetic oligonucleotide

SEQ ID NO: 2274 - DNA, 37 bp, Artificial Sequence
  Synthetic oligonucleotide
cgcttccgctacgtaccccccgggcgttcgccttgga

SEQ ID NO: 2275 - DNA, 37 bp, Artificial Sequence
  Synthetic oligonucleotide
ctcaaagcaacttgctggtgccagcaccgaagtccga

SEQ ID NO: 2276 - DNA, 38 bp, Artificial Sequence
  Synthetic oligonucleotide
ccttacatttatgttgaggcccccggtaattattgtga

SEQ ID NO: 2277 - DNA, 35 bp, Artificial Sequence
  Synthetic oligonucleotide
ctggtaccctgcgattcgggtctcgacttggttcc

SEQ ID NO: 2278 - DNA, 37 bp, Artificial Sequence
  Synthetic oligonucleotide
gaacgtacgccttcctcgtaataattggaaccttcta

SEQ ID NO: 2279 - DNA, 35 bp, Artificial Sequence
  Synthetic oligonucleotide
cttcgccatcttccggtcggcgaaaaacaggccac

SEQ ID NO: 2280 - DNA, 35 bp, Artificial Sequence; identical to SEQ ID NO: 1918
  Synthetic oligonucleotide

SEQ ID NO: 2281 - DNA, 37 bp, Artificial Sequence
  Synthetic oligonucleotide
gaggacattggaccgccccatacgaacgccactctga

SEQ ID NO: 2282 - DNA, 36 bp, Artificial Sequence
  Synthetic oligonucleotide
gagtacgactaattatcttaacaacatttatgaaca

SEQ ID NO: 2283 - DNA, 35 bp, Artificial Sequence
  Synthetic oligonucleotide
gagtagttgcatcgaagcggaggcttttccggatc

SEQ ID NO: 2284 - DNA, 36 bp, Artificial Sequence
  Synthetic oligonucleotide
gcactgtccccggttttctactaactctgatcttga

SEQ ID NO: 2285 - DNA, 38 bp, Artificial Sequence
  Synthetic oligonucleotide
gcgtcctgcactgttttacagttcttggtaatatttga

SEQ ID NO: 2286 - DNA, 37 bp, Artificial Sequence
  Synthetic oligonucleotide
ggcacacacctagcctgaaaggtcctttaacattgga

SEQ ID NO: 2287 - DNA, 37 bp, Artificial Sequence
  Synthetic oligonucleotide
ggcccagtactcacgctagaccctcgaggggactcga

SEQ ID NO: 2288 - DNA, 35 bp, Artificial Sequence
  Synthetic oligonucleotide
ggacccgtaccgacacctatagccttcccccagag

SEQ ID NO: 2289 - DNA, 37 bp, Artificial Sequence
  Synthetic oligonucleotide
ggtctagcgggtacaccttctggggttcggtttgtga

SEQ ID NO: 2290 - DNA, 37 bp, Artificial Sequence; identical to SEQ ID NO: 1939
  Synthetic oligonucleotide

SEQ ID NO: 2291 - DNA, 37 bp, Artificial Sequence
  Synthetic oligonucleotide
gggaactcgcaaaatttcttgaccccaaggtacccga

SEQ ID NO: 2292 - DNA, 37 bp, Artificial Sequence
  Synthetic oligonucleotide
ggtccttgagcatcaaatcgctaagggggtccgcaga

SEQ ID NO: 2293 - DNA, 37 bp, Artificial Sequence
  Synthetic oligonucleotide
gtctggtttttatattcagagccctgtttgggttaga

SEQ ID NO: 2294 - DNA, 35 bp, Artificial Sequence
  Synthetic oligonucleotide
taaggatagcgctcggcctttattgatacttgttt

SEQ ID NO: 2295 - DNA, 38 bp, Artificial Sequence
  Synthetic oligonucleotide
taaccgcatcactttcacttgacactaatacctcatga

SEQ ID NO: 2296 - DNA, 36 bp, Artificial Sequence
  Synthetic oligonucleotide
taatatccctgctctcgaacacttcgctttaaacta

SEQ ID NO: 2297 - DNA, 36 bp, Artificial Sequence; identical to SEQ ID NO: 1719
  Synthetic oligonucleotide

SEQ ID NO: 2298 - DNA, 36 bp, Artificial Sequence
  Synthetic oligonucleotide
gttccgctccagggaacagaggatcagggagttcga

SEQ ID NO: 2299 - DNA, 37 bp, Artificial Sequence
  Synthetic oligonucleotide
tatatccgcatcccgaagcatagatctcaagtactga

SEQ ID NO: 2300 - DNA, 38 bp, Artificial Sequence
  Synthetic oligonucleotide
tatacacccgaaaagcgggttatcaaaaattatcatga

SEQ ID NO: 2301 - DNA, 35 bp, Artificial Sequence
  Synthetic oligonucleotide
tactatcttctagttcaacagccacttatgaccca

SEQ ID NO: 2302 - DNA, 35 bp, Artificial Sequence
  Synthetic oligonucleotide
tacgccccttaacctctaaccagcgagggtagttc

SEQ ID NO: 2303 - DNA, 36 bp, Artificial Sequence
  Synthetic oligonucleotide
tcaacgaccgcgaggttgaacgacgtggggactgta

SEQ ID NO: 2304 - DNA, 38 bp, Artificial Sequence
  Synthetic oligonucleotide
tattatgttcacggccggaggggggccgggggatgcga

SEQ ID NO: 2305 - DNA, 36 bp, Artificial Sequence
  Synthetic oligonucleotide
tcgcatacaacaaaattacgcctaaccataacacca

SEQ ID NO: 2306 - DNA, 38 bp, Artificial Sequence
  Synthetic oligonucleotide
tgaagtactcgtaagttttatagtttttcattctatga

SEQ ID NO: 2307 - DNA, 36 bp, Artificial Sequence
  Synthetic oligonucleotide
tgacaaaagtcccctgaggggtggactcgtgaccca

SEQ ID NO: 2308 - DNA, 35 bp, Artificial Sequence
  Synthetic oligonucleotide
tgcgggtgcatgccgagtgagccgaacgacccatc

SEQ ID NO: 2309 - DNA, 38 bp, Artificial Sequence
  Synthetic oligonucleotide
tggccggggtttggccccagaaagatacgccggggtga

SEQ ID NO: 2310 - DNA, 36 bp, Artificial Sequence
  Synthetic oligonucleotide
tggacctactacgcttgggcaacgcgggggccccta

SEQ ID NO: 2311 - DNA, 38 bp, Artificial Sequence
  Synthetic oligonucleotide
tggacgattttgccaccgttagtacaacccgggggtga

SEQ ID NO: 2312 - DNA, 35 bp, Artificial Sequence
  Synthetic oligonucleotide
tgtagcccaggagaaaccctaccccaacggacgcg

SEQ ID NO: 2313 - DNA, 36 bp, Artificial Sequence
  Synthetic oligonucleotide
tgtggcgagggccgcctccaggcatgaaatgtatca

SEQ ID NO: 2314 - DNA, 38 bp, Artificial Sequence
  Synthetic oligonucleotide
tgtttgcttcatagtaacgttgagactgcataaactga

SEQ ID NO: 2315 - DNA, 35 bp, Artificial Sequence
  Synthetic oligonucleotide
tgttagttccactttccgataatccgcctccctta

SEQ ID NO: 2316 - DNA, 35 bp, Artificial Sequence
  Synthetic oligonucleotide
ttctcgacggccttccaggcgggagacaaagctgc

SEQ ID NO: 2317 - DNA, 38 bp, Artificial Sequence
  Synthetic oligonucleotide
ttcatggacgaaacgggcggcggacatttattcgctga

SEQ ID NO: 2318 - DNA, 38 bp, Artificial Sequence
  Synthetic oligonucleotide
tttgctccggtgtttgaccctcgcagtccggagagtga

SEQ ID NO: 2319 - DNA, 35 bp, Artificial Sequence; identical to SEQ ID NO: 2007
  Synthetic oligonucleotide

SEQ ID NO: 2320 - DNA, 36 bp, Artificial Sequence; identical to SEQ ID NO: 1590
  Synthetic oligonucleotide

SEQ ID NO: 2321 - DNA, 35 bp, Artificial Sequence; identical to SEQ ID NO: 1591
  Synthetic oligonucleotide

SEQ ID NO: 2322 - DNA, 38 bp, Artificial Sequence; identical to SEQ ID NO: 2016
  Synthetic oligonucleotide

SEQ ID NO: 2323 - DNA, 37 bp, Artificial Sequence
  Synthetic oligonucleotide
aacgcgctggtcttcgtgtattgtttcgcgctaagga

SEQ ID NO: 2324 - DNA, 35 bp, Artificial Sequence
  Synthetic oligonucleotide
aactatcattcatcttggtgtgatctacctttgtt

SEQ ID NO: 2325 - DNA, 37 bp, Artificial Sequence; identical to SEQ ID NO: 2005
  Synthetic oligonucleotide

SEQ ID NO: 2326 - DNA, 36 bp, Artificial Sequence
  Synthetic oligonucleotide
cttctatatatctcattcttccggtttattcaatca

SEQ ID NO: 2327 - DNA, 36 bp, Artificial Sequence; identical to SEQ ID NO: 1586
  Synthetic oligonucleotide

SEQ ID NO: 2328 - DNA, 37 bp, Artificial Sequence; identical to SEQ ID NO: 1595
  Synthetic oligonucleotide

SEQ ID NO: 2329 - DNA, 35 bp, Artificial Sequence; identical to SEQ ID NO: 1740
  Synthetic oligonucleotide

SEQ ID NO: 2330 - DNA, 35 bp, Artificial Sequence
  Synthetic oligonucleotide
acgcttcttttacttagctaaccattattcattgt

SEQ ID NO: 2331 - DNA, 37 bp, Artificial Sequence; identical to SEQ ID NO: 1587
  Synthetic oligonucleotide

SEQ ID NO: 2332 - DNA, 38 bp, Artificial Sequence; identical to SEQ ID NO: 2012
  Synthetic oligonucleotide

SEQ ID NO: 2333 - DNA, 35 bp, Artificial Sequence; identical to SEQ ID NO: 2014
  Synthetic oligonucleotide

SEQ ID NO: 2334 - DNA, 38 bp, Artificial Sequence; identical to SEQ ID NO: 1596
  Synthetic oligonucleotide

SEQ ID NO: 2335 - DNA, 35 bp, Artificial Sequence; identical to SEQ ID NO: 2028
  Synthetic oligonucleotide

SEQ ID NO: 2336 - DNA, 35 bp, Artificial Sequence; identical to SEQ ID NO: 1644
  Synthetic oligonucleotide

SEQ ID NO: 2337 - DNA, 36 bp, Artificial Sequence; identical to SEQ ID NO: 1638
  Synthetic oligonucleotide

SEQ ID NO: 2338 - DNA, 36 bp, Artificial Sequence; identical to SEQ ID NO: 2038
  Synthetic oligonucleotide

SEQ ID NO: 2339 - DNA, 35 bp, Artificial Sequence; identical to SEQ ID NO: 1606
  Synthetic oligonucleotide

SEQ ID NO: 2340 - DNA, 35 bp, Artificial Sequence; identical to SEQ ID NO: 2045
  Synthetic oligonucleotide

SEQ ID NO: 2341 - DNA, 38 bp, Artificial Sequence
  Synthetic oligonucleotide
ttctgccggtttttacggtcaaattctagatagtttga

SEQ ID NO: 2342 - DNA, 36 bp, Artificial Sequence; identical to SEQ ID NO: 1769
  Synthetic oligonucleotide

SEQ ID NO: 2343 - DNA, 38 bp, Artificial Sequence; identical to SEQ ID NO: 1601
  Synthetic oligonucleotide

SEQ ID NO: 2344 - DNA, 36 bp, Artificial Sequence; identical to SEQ ID NO: 1604
  Synthetic oligonucleotide

SEQ ID NO: 2345 - DNA, 35 bp, Artificial Sequence; identical to SEQ ID NO: 1605
  Synthetic oligonucleotide

SEQ ID NO: 2346 - DNA, 35 bp, Artificial Sequence; identical to SEQ ID NO: 2042
  Synthetic oligonucleotide

SEQ ID NO: 2347 - DNA, 36 bp, Artificial Sequence; identical to SEQ ID NO: 2043
  Synthetic oligonucleotide

SEQ ID NO: 2348 - DNA, 36 bp, Artificial Sequence; identical to SEQ ID NO: 2047
  Synthetic oligonucleotide

SEQ ID NO: 2349 - DNA, 36 bp, Artificial Sequence; identical to SEQ ID NO: 1611
  Synthetic oligonucleotide

SEQ ID NO: 2350 - DNA, 36 bp, Artificial Sequence; identical to SEQ ID NO: 1750
  Synthetic oligonucleotide

SEQ ID NO: 2351 - DNA, 36 bp, Artificial Sequence; identical to SEQ ID NO: 1598
  Synthetic oligonucleotide

SEQ ID NO: 2352 - DNA, 35 bp, Artificial Sequence; identical to SEQ ID NO: 1599
  Synthetic oligonucleotide

SEQ ID NO: 2353 - DNA, 37 bp, Artificial Sequence; identical to SEQ ID NO: 1649
  Synthetic oligonucleotide

SEQ ID NO: 2354 - DNA, 36 bp, Artificial Sequence; identical to SEQ ID NO: 1603
  Synthetic oligonucleotide

SEQ ID NO: 2355 - DNA, 36 bp, Artificial Sequence; identical to SEQ ID NO: 2048
  Synthetic oligonucleotide

SEQ ID NO: 2356 - DNA, 38 bp, Artificial Sequence; identical to SEQ ID NO: 1609
  Synthetic oligonucleotide

SEQ ID NO: 2357 - DNA, 35 bp, Artificial Sequence
  Synthetic oligonucleotide
aaatcccaacgagcccttaacccagaccaactaca

SEQ ID NO: 2358 - DNA, 37 bp, Artificial Sequence; identical to SEQ ID NO: 2055
  Synthetic oligonucleotide

SEQ ID NO: 2359 - DNA, 37 bp, Artificial Sequence
  Synthetic oligonucleotide
aacgtagtgaggtattccgcaccccctttattcgtga

SEQ ID NO: 2360 - DNA, 36 bp, Artificial Sequence
  Synthetic oligonucleotide
aacccaattcacatacactctcacccacactaaaca

SEQ ID NO: 2361 - DNA, 38 bp, Artificial Sequence
  Synthetic oligonucleotide
aaaaccgctcgcttaagctttctttgactttttgatga

SEQ ID NO: 2362 - DNA, 36 bp, Artificial Sequence
  Synthetic oligonucleotide
aatgcacaaccgcgctgaaaatcacctttatcgaaa

SEQ ID NO: 2363 - DNA, 37 bp, Artificial Sequence
  Synthetic oligonucleotide
aattgatctttttgtttacgaattcgtattccattga

SEQ ID NO: 2364 - DNA, 38 bp, Artificial Sequence
  Synthetic oligonucleotide
aatcaccacaaatactttcgcctatctcgcttatctga

SEQ ID NO: 2365 - DNA, 36 bp, Artificial Sequence
  Synthetic oligonucleotide
aacttgtcttatgctctccaccttacctattaacaa

SEQ ID NO: 2366 - DNA, 37 bp, Artificial Sequence
  Synthetic oligonucleotide
aactcctgatatcgtttcttcgtttccgccaattcta

SEQ ID NO: 2367 - DNA, 35 bp, Artificial Sequence; identical to SEQ ID NO: 2061
  Synthetic oligonucleotide

SEQ ID NO: 2368 - DNA, 38 bp, Artificial Sequence; identical to SEQ ID NO: 2024
  Synthetic oligonucleotide

SEQ ID NO: 2369 - DNA, 36 bp, Artificial Sequence
  Synthetic oligonucleotide
accgggaacatttctgttgtttcatttcatcactaa

SEQ ID NO: 2370 - DNA, 35 bp, Artificial Sequence; identical to SEQ ID NO: 2330
  Synthetic oligonucleotide

SEQ ID NO: 2371 - DNA, 37 bp, Artificial Sequence; identical to SEQ ID NO: 2067
  Synthetic oligonucleotide

SEQ ID NO: 2372 - DNA, 35 bp, Artificial Sequence
  Synthetic oligonucleotide
accgacgcactctcctttctaaaatctatctactt

SEQ ID NO: 2373 - DNA, 35 bp, Artificial Sequence
  Synthetic oligonucleotide
acgttaatttcccaaaaacgatcccactttgaaca

SEQ ID NO: 2374 - DNA, 36 bp, Artificial Sequence
  Synthetic oligonucleotide
actcgcccttcacgactttatcaaaatgtactttca

SEQ ID NO: 2375 - DNA, 38 bp, Artificial Sequence; identical to SEQ ID NO: 2071
  Synthetic oligonucleotide

SEQ ID NO: 2376 - DNA, 35 bp, Artificial Sequence; identical to SEQ ID NO: 1597
  Synthetic oligonucleotide

SEQ ID NO: 2377 - DNA, 36 bp, Artificial Sequence; identical to SEQ ID NO: 1617
  Synthetic oligonucleotide

SEQ ID NO: 2378 - DNA, 36 bp, Artificial Sequence
  Synthetic oligonucleotide
acttcgcccacacaataccattatcgataactcaaa

SEQ ID NO: 2379 - DNA, 35 bp, Artificial Sequence; identical to SEQ ID NO: 1591
  Synthetic oligonucleotide

SEQ ID NO: 2380 - DNA, 36 bp, Artificial Sequence; identical to SEQ ID NO: 1590
  Synthetic oligonucleotide

SEQ ID NO: 2381 - DNA, 38 bp, Artificial Sequence; identical to SEQ ID NO: 2023
  Synthetic oligonucleotide

SEQ ID NO: 2382 - DNA, 36 bp, Artificial Sequence; identical to SEQ ID NO: 1586
  Synthetic oligonucleotide

SEQ ID NO: 2383 - DNA, 35 bp, Artificial Sequence; identical to SEQ ID NO: 1620
  Synthetic oligonucleotide

SEQ ID NO: 2384 - DNA, 35 bp, Artificial Sequence
  Synthetic oligonucleotide
atatgcccgctccctactcaatatcttcccataca

SEQ ID NO: 2385 - DNA, 35 bp, Artificial Sequence; identical to SEQ ID NO: 1594
  Synthetic oligonucleotide

SEQ ID NO: 2386 - DNA, 37 bp, Artificial Sequence
  Synthetic oligonucleotide
atgcattatcccagctttaaacgctctacccaccgaa

SEQ ID NO: 2387 - DNA, 36 bp, Artificial Sequence; identical to SEQ ID NO: 2092
  Synthetic oligonucleotide

SEQ ID NO: 2388 - DNA, 35 bp, Artificial Sequence
  Synthetic oligonucleotide
atctgcttgtaagtccccgtgtatacctgttcagt

SEQ ID NO: 2389 - DNA, 35 bp, Artificial Sequence
  Synthetic oligonucleotide
atcactggagtgatagtctgggccctgaaactcct

SEQ ID NO: 2390 - DNA, 36 bp, Artificial Sequence
  Synthetic oligonucleotide
atcaccgtccttatcatacccacttcgttttttata

SEQ ID NO: 2391 - DNA, 35 bp, Artificial Sequence; identical to SEQ ID NO: 1740
  Synthetic oligonucleotide

SEQ ID NO: 2392 - DNA, 37 bp, Artificial Sequence; identical to SEQ ID NO: 2094
  Synthetic oligonucleotide

SEQ ID NO: 2393 - DNA, 36 bp, Artificial Sequence; identical to SEQ ID NO: 2098
  Synthetic oligonucleotide

SEQ ID NO: 2394 - DNA, 37 bp, Artificial Sequence; identical to SEQ ID NO: 1587
  Synthetic oligonucleotide

SEQ ID NO: 2395 - DNA, 38 bp, Artificial Sequence; identical to SEQ ID NO: 2100
  Synthetic oligonucleotide

SEQ ID NO: 2396 - DNA, 35 bp, Artificial Sequence
  Synthetic oligonucleotide
ccagcacactgacttttccttacccacctcctttc

SEQ ID NO: 2397 - DNA, 38 bp, Artificial Sequence
  Synthetic oligonucleotide
ccccgccatggtttcaaatggctgaagctatctattga

SEQ ID NO: 2398 - DNA, 38 bp, Artificial Sequence
  Synthetic oligonucleotide
ccggtatctgcactcgtttggaatcgaccaacccctga

SEQ ID NO: 2399 - DNA, 37 bp, Artificial Sequence
  Synthetic oligonucleotide
ccgtctactgcaacaggaggccaccacggtcttccga

SEQ ID NO: 2400 - DNA, 37 bp, Artificial Sequence
  Synthetic oligonucleotide
cgctcttcttactttattcaatatggtcataaattga

SEQ ID NO: 2401 - DNA, 37 bp, Artificial Sequence
  Synthetic oligonucleotide
cgtttctttatcccaaagtcattcgcatgccctttga

SEQ ID NO: 2402 - DNA, 38 bp, Artificial Sequence; identical to SEQ ID NO: 1596
  Synthetic oligonucleotide

SEQ ID NO: 2403 - DNA, 35 bp, Artificial Sequence
  Synthetic oligonucleotide
cgcgcctccttccccgatgatatgccactgccgca

SEQ ID NO: 2404 - DNA, 35 bp, Artificial Sequence; identical to SEQ ID NO: 2114
  Synthetic oligonucleotide

SEQ ID NO: 2405 - DNA, 37 bp, Artificial Sequence
  Synthetic oligonucleotide
cgcttcttgggcaggaggcgacacaggttcatattga

SEQ ID NO: 2406 - DNA, 35 bp, Artificial Sequence; identical to SEQ ID NO: 2120
  Synthetic oligonucleotide

SEQ ID NO: 2407 - DNA, 37 bp, Artificial Sequence
  Synthetic oligonucleotide
ctgtcccttgtaaggattattcgtaggtatttagtga

SEQ ID NO: 2408 - DNA, 37 bp, Artificial Sequence
  Synthetic oligonucleotide
ctgcggtcacctgcatagtaattaataatatacgtga

SEQ ID NO: 2409 - DNA, 37 bp, Artificial Sequence
  Synthetic oligonucleotide
cttcgctaaatggctgggggaatcatactgccggaga

SEQ ID NO: 2410 - DNA, 35 bp, Artificial Sequence
  Synthetic oligonucleotide
ctcctgcagatcttggtacctcttgttctttcata

SEQ ID NO: 2411 - DNA, 37 bp, Artificial Sequence; identical to SEQ ID NO: 1595
  Synthetic oligonucleotide

SEQ ID NO: 2412 - DNA, 35 bp, Artificial Sequence
  Synthetic oligonucleotide
gaggacttttacttatcaaccccacctttcgaaca

SEQ ID NO: 2413 - DNA, 35 bp, Artificial Sequence
  Synthetic oligonucleotide
gagtacttgactcttgtatattttttctccccctt

SEQ ID NO: 2414 - DNA, 37 bp, Artificial Sequence
  Synthetic oligonucleotide
gatcccgttccttttttaacgatctattttcttttga

SEQ ID NO: 2415 - DNA, 35 bp, Artificial Sequence; identical to SEQ ID NO: 2140
  Synthetic oligonucleotide

SEQ ID NO: 2416 - DNA, 35 bp, Artificial Sequence; identical to SEQ ID NO: 2014
  Synthetic oligonucleotide

SEQ ID NO: 2417 - DNA, 35 bp, Artificial Sequence; identical to SEQ ID NO: 1600
  Synthetic oligonucleotide

SEQ ID NO: 2418 - DNA, 36 bp, Artificial Sequence; identical to SEQ ID NO: 2143
  Synthetic oligonucleotide

SEQ ID NO: 2419 - DNA, 36 bp, Artificial Sequence; identical to SEQ ID NO: 2147
  Synthetic oligonucleotide

SEQ ID NO: 2420 - DNA, 36 bp, Artificial Sequence; identical to SEQ ID NO: 2151
  Synthetic oligonucleotide

SEQ ID NO: 2421 - DNA, 37 bp, Artificial Sequence
  Synthetic oligonucleotide
gcggaatagtccacgggacgctaagcgtggagctcga

SEQ ID NO: 2422 - DNA, 36 bp, Artificial Sequence
  Synthetic oligonucleotide
gcgtccactctatccttgctttaatacatcgttaaa

SEQ ID NO: 2423 - DNA, 38 bp, Artificial Sequence
  Synthetic oligonucleotide
gcctttccaggttcttcttttcgaccgtttatttttga

SEQ ID NO: 2424 - DNA, 38 bp, Artificial Sequence
  Synthetic oligonucleotide
ggccctggtggcaccaagccgcgagcccactcaactga

SEQ ID NO: 2425 - DNA, 35 bp, Artificial Sequence
  Synthetic oligonucleotide
ggtgcccaactggtgcttctccttctttgagacgt

SEQ ID NO: 2426 - DNA, 38 bp, Artificial Sequence
  Synthetic oligonucleotide
gggagtttttatcctacaatgtaaattatcatacttga

SEQ ID NO: 2427 - DNA, 38 bp, Artificial Sequence; identical to SEQ ID NO: 1601
  Synthetic oligonucleotide

SEQ ID NO: 2428 - DNA, 36 bp, Artificial Sequence
  Synthetic oligonucleotide
ggtcccactctgaccatcaattcacctaacttgtaa

SEQ ID NO: 2429 - DNA, 35 bp, Artificial Sequence; identical to SEQ ID NO: 1606
  Synthetic oligonucleotide

SEQ ID NO: 2430 - DNA, 37 bp, Artificial Sequence; identical to SEQ ID NO: 2166
  Synthetic oligonucleotide

SEQ ID NO: 2431 - DNA, 36 bp, Artificial Sequence; identical to SEQ ID NO: 1598
  Synthetic oligonucleotide

SEQ ID NO: 2432 - DNA, 38 bp, Artificial Sequence; identical to SEQ ID NO: 1772
  Synthetic oligonucleotide

SEQ ID NO: 2433 - DNA, 35 bp, Artificial Sequence
  Synthetic oligonucleotide
gtcgaaagcggagcgactctccgcacaaccccaag

SEQ ID NO: 2434 - DNA, 36 bp, Artificial Sequence; identical to SEQ ID NO: 1602
  Synthetic oligonucleotide

SEQ ID NO: 2435 - DNA, 36 bp, Artificial Sequence; identical to SEQ ID NO: 1603
  Synthetic oligonucleotide

SEQ ID NO: 2436 - DNA, 35 bp, Artificial Sequence
  Synthetic oligonucleotide
gttcagattttgctttgtgacctggtgtggggtct

SEQ ID NO: 2437 - DNA, 37 bp, Artificial Sequence; identical to SEQ ID NO: 2178
  Synthetic oligonucleotide

SEQ ID NO: 2438 - DNA, 36 bp, Artificial Sequence; identical to SEQ ID NO: 2048
  Synthetic oligonucleotide

SEQ ID NO: 2439 - DNA, 35 bp, Artificial Sequence; identical to SEQ ID NO: 1607
  Synthetic oligonucleotide

SEQ ID NO: 2440 - DNA, 36 bp, Artificial Sequence
  Synthetic oligonucleotide
tactctagtcagaggatctcttgcgatcaatatgga

SEQ ID NO: 2441 - DNA, 35 bp, Artificial Sequence
  Synthetic oligonucleotide
tactgtccttttcaattcttgtcttggttttatta

SEQ ID NO: 2442 - DNA, 35 bp, Artificial Sequence
  Synthetic oligonucleotide
tactcggccctactacacgaactcttttcaaatca

SEQ ID NO: 2443 - DNA, 35 bp, Artificial Sequence; identical to SEQ ID NO: 2186
  Synthetic oligonucleotide

SEQ ID NO: 2444 - DNA, 38 bp, Artificial Sequence
  Synthetic oligonucleotide
tattgtagcctgtacggcggctgcacctcgtacgttga

SEQ ID NO: 2445 - DNA, 35 bp, Artificial Sequence
  Synthetic oligonucleotide
tcactttgcccttttgtttcttcattaattccttc

SEQ ID NO: 2446 - DNA, 38 bp, Artificial Sequence
  Synthetic oligonucleotide
tcacgctcccggggttctatctatttcgttattcttga

SEQ ID NO: 2447 - DNA, 36 bp, Artificial Sequence; identical to SEQ ID NO: 1638
  Synthetic oligonucleotide

SEQ ID NO: 2448 - DNA, 36 bp, Artificial Sequence; identical to SEQ ID NO: 2038
  Synthetic oligonucleotide

SEQ ID NO: 2449 - DNA, 38 bp, Artificial Sequence; identical to SEQ ID NO: 1608
  Synthetic oligonucleotide

SEQ ID NO: 2450 - DNA, 35 bp, Artificial Sequence
  Synthetic oligonucleotide
tccatcatattcattattccatgcctacccatccc

SEQ ID NO: 2451 - DNA, 37 bp, Artificial Sequence; identical to SEQ ID NO: 1639
  Synthetic oligonucleotide

SEQ ID NO: 2452 - DNA, 38 bp, Artificial Sequence
  Synthetic oligonucleotide
tccccataatctccgtcctcattgcttccaaaatttga

SEQ ID NO: 2453 - DNA, 38 bp, Artificial Sequence
  Synthetic oligonucleotide
tcccctcgccactgacccatctactcgccaaatcttga

SEQ ID NO: 2454 - DNA, 38 bp, Artificial Sequence
  Synthetic oligonucleotide
tcgggcaataccctttcccatattatcttctttcctta

SEQ ID NO: 2455 - DNA, 36 bp, Artificial Sequence
  Synthetic oligonucleotide
tctcgggattttccgcgactactcgagcgctactca

SEQ ID NO: 2456 - DNA, 36 bp, Artificial Sequence
  Synthetic oligonucleotide
tcgcttccttgtacttcctattcccttttcaccaca

SEQ ID NO: 2457 - DNA, 36 bp, Artificial Sequence; identical to SEQ ID NO: 1604
  Synthetic oligonucleotide

SEQ ID NO: 2458 - DNA, 36 bp, Artificial Sequence
  Synthetic oligonucleotide
tcttcacgatatgcagtgaaaacaccacccaactta

SEQ ID NO: 2459 - DNA, 37 bp, Artificial Sequence
  Synthetic oligonucleotide
tctgcttgatggtgctttcagtttcttacttctacga

SEQ ID NO: 2460 - DNA, 35 bp, Artificial Sequence
  Synthetic oligonucleotide
tcttctgtaaccattttgttccggtttttttattt

SEQ ID NO: 2461 - DNA, 36 bp, Artificial Sequence
  Synthetic oligonucleotide
tgaagctccgaaggggtgcacttgccgacagtagta

SEQ ID NO: 2462 - DNA, 35 bp, Artificial Sequence
  Synthetic oligonucleotide
tgacgtctcctgttcggttaaccctgtgtgcctgt

SEQ ID NO: 2463 - DNA, 37 bp, Artificial Sequence
  Synthetic oligonucleotide
tgcccttcttcgtttactcttatccacattaccttga

SEQ ID NO: 2464 - DNA, 36 bp, Artificial Sequence; identical to SEQ ID NO: 1750
  Synthetic oligonucleotide

SEQ ID NO: 2465 - DNA, 36 bp, Artificial Sequence
  Synthetic oligonucleotide
tgacatatcgctcttacatcccctcacacaatttca

SEQ ID NO: 2466 - DNA, 35 bp, Artificial Sequence
  Synthetic oligonucleotide
tgctccgagtaccataaactaatttgaagctctac

SEQ ID NO: 2467 - DNA, 37 bp, Artificial Sequence; identical to SEQ ID NO: 2209
  Synthetic oligonucleotide

SEQ ID NO: 2468 - DNA, 36 bp, Artificial Sequence
  Synthetic oligonucleotide
tggaccggtcaaaggatggcaccggttcctctcaca

SEQ ID NO: 2469 - DNA, 38 bp, Artificial Sequence; identical to SEQ ID NO: 1609
  Synthetic oligonucleotide

SEQ ID NO: 2470 - DNA, 38 bp, Artificial Sequence
  Synthetic oligonucleotide
tgctttgtacaacgttggtgtttggcatttgctgttga

SEQ ID NO: 2471 - DNA, 38 bp, Artificial Sequence; identical to SEQ ID NO: 2218
  Synthetic oligonucleotide

SEQ ID NO: 2472 - DNA, 35 bp, Artificial Sequence
  Synthetic oligonucleotide
tgtgccactcgtgttcgaatttctgttccttatct

SEQ ID NO: 2473 - DNA, 37 bp, Artificial Sequence
  Synthetic oligonucleotide
tgttacgcccgtcctctatacaccaattacgatatga

SEQ ID NO: 2474 - DNA, 36 bp, Artificial Sequence
  Synthetic oligonucleotide
tgttaggcctttatttccattatcttaattgtttta

SEQ ID NO: 2475 - DNA, 35 bp, Artificial Sequence; identical to SEQ ID NO: 1644
  Synthetic oligonucleotide

SEQ ID NO: 2476 - DNA, 36 bp, Artificial Sequence
  Synthetic oligonucleotide
ttctgccggatacatttgattcaataactacttgta

SEQ ID NO: 2477 - DNA, 35 bp, Artificial Sequence
  Synthetic oligonucleotide
ttctgcttgcgagccgtccagttagggccgccacc

SEQ ID NO: 2478 - DNA, 38 bp, Artificial Sequence; identical to SEQ ID NO: 2341
  Synthetic oligonucleotide

SEQ ID NO: 2479 - DNA, 36 bp, Artificial Sequence
  Synthetic oligonucleotide
ttgcacgccccaatacacctaatctttatccataca

SEQ ID NO: 2480 - DNA, 38 bp, Artificial Sequence
  Synthetic oligonucleotide
ttcgttccggaccacccatttcctcaatcatatattga

SEQ ID NO: 2481 - DNA, 37 bp, Artificial Sequence
  Synthetic oligonucleotide
ttctgcgttttacgatgctcgatgtctgtgacatgga

SEQ ID NO: 2482 - DNA, 36 bp, Artificial Sequence
  Synthetic oligonucleotide
ttgctccgacctagtttactaaatttcaaccattga

SEQ ID NO: 2483 - DNA, 36 bp, Artificial Sequence
  Synthetic oligonucleotide
tttcattataccccatcgactttctctctagttcca

SEQ ID NO: 2484 - DNA, 35 bp, Artificial Sequence
  Synthetic oligonucleotide
ttgtcccaggcagtttccacgagaacgcgtacggt

SEQ ID NO: 2485 - DNA, 38 bp, Artificial Sequence
  Synthetic oligonucleotide
tttggacgtatcactccctaaccatttttttaccctga

SEQ ID NO: 2486 - DNA, 36 bp, Artificial Sequence; identical to SEQ ID NO: 1611
  Synthetic oligonucleotide

SEQ ID NO: 2487 - DNA, 35 bp, Artificial Sequence
  Synthetic oligonucleotide
tttcctgtttcttctttgtgtgtccatataatcga

SEQ ID NO: 2488 - DNA, 35 bp, Artificial Sequence; identical to SEQ ID NO: 1605
  Synthetic oligonucleotide

SEQ ID NO: 2489 - DNA, 36 bp, Artificial Sequence
  Synthetic oligonucleotide
tttaaacgtacgatattacttccgatccatacatta

SEQ ID NO: 2490 - DNA, 37 bp, Artificial Sequence; identical to SEQ ID NO: 1649
  Synthetic oligonucleotide

SEQ ID NO: 2491 - DNA, 35 bp, Artificial Sequence; identical to SEQ ID NO: 1599
  Synthetic oligonucleotide

SEQ ID NO: 2492 - DNA, 36 bp, Artificial Sequence; identical to SEQ ID NO: 1651
  Synthetic oligonucleotide

SEQ ID NO: 2493 - DNA, 36 bp, Artificial Sequence; identical to SEQ ID NO: 1652
  Synthetic oligonucleotide

SEQ ID NO: 2494 - DNA, 37 bp, Artificial Sequence; identical to SEQ ID NO: 2237
  Synthetic oligonucleotide

SEQ ID NO: 2495 - DNA, 38 bp, Artificial Sequence; identical to SEQ ID NO: 1653
  Synthetic oligonucleotide

SEQ ID NO: 2496 - DNA, 37 bp, Artificial Sequence
  Synthetic oligonucleotide
acaactatcaaataaacctgcgccctctatgaatgga

SEQ ID NO: 2497 - DNA, 36 bp, Artificial Sequence
  Synthetic oligonucleotide
gaccaatagacccggccaagactggagatgaaagta

SEQ ID NO: 2498 - DNA, 38 bp, Artificial Sequence; identical to SEQ ID NO: 1792
  Synthetic oligonucleotide

SEQ ID NO: 2499 - DNA, 36 bp, Artificial Sequence; identical to SEQ ID NO: 1661
  Synthetic oligonucleotide

SEQ ID NO: 2500 - DNA, 35 bp, Artificial Sequence
  Synthetic oligonucleotide
acggtatttgttttttcgattgatggggaagtaga

SEQ ID NO: 2501 - DNA, 38 bp, Artificial Sequence
  Synthetic oligonucleotide
ccacccgtacgaagccgcgttttctgagtgcctattga

SEQ ID NO: 2502 - DNA, 38 bp, Artificial Sequence; identical to SEQ ID NO: 1731
  Synthetic oligonucleotide

SEQ ID NO: 2503 - DNA, 35 bp, Artificial Sequence
  Synthetic oligonucleotide
ggccaatttgaatgagggttgtgaattatttaaga

SEQ ID NO: 2504 - DNA, 37 bp, Artificial Sequence
  Synthetic oligonucleotide
ggcctaaccatggggggtggtgattattatgaaggga

SEQ ID NO: 2505 - DNA, 36 bp, Artificial Sequence
  Synthetic oligonucleotide
ttcatcgcggggccgaggtaagcctaatcttccgta

SEQ ID NO: 2506 - DNA, 37 bp, Artificial Sequence
  Synthetic oligonucleotide
gtaactggtatcctaaaagaataggttcgtaccccga

SEQ ID NO: 2507 - DNA, 36 bp, Artificial Sequence; identical to SEQ ID NO: 2242
  Synthetic oligonucleotide

SEQ ID NO: 2508 - DNA, 36 bp, Artificial Sequence; identical to SEQ ID NO: 2243
  Synthetic oligonucleotide

SEQ ID NO: 2509 - DNA, 35 bp, Artificial Sequence; identical to SEQ ID NO: 2244
  Synthetic oligonucleotide

SEQ ID NO: 2510 - DNA, 35 bp, Artificial Sequence; identical to SEQ ID NO: 2245
  Synthetic oligonucleotide

SEQ ID NO: 2511 - DNA, 38 bp, Artificial Sequence; identical to SEQ ID NO: 2246
  Synthetic oligonucleotide

SEQ ID NO: 2512 - DNA, 35 bp, Artificial Sequence; identical to SEQ ID NO: 2247
  Synthetic oligonucleotide

SEQ ID NO: 2513 - DNA, 38 bp, Artificial Sequence; identical to SEQ ID NO: 2248
  Synthetic oligonucleotide

SEQ ID NO: 2514 - DNA, 37 bp, Artificial Sequence; identical to SEQ ID NO: 2249
  Synthetic oligonucleotide

SEQ ID NO: 2515 - DNA, 35 bp, Artificial Sequence; identical to SEQ ID NO: 2250
  Synthetic oligonucleotide

SEQ ID NO: 2516 - DNA, 37 bp, Artificial Sequence; identical to SEQ ID NO: 2251
  Synthetic oligonucleotide

SEQ ID NO: 2517 - DNA, 35 bp, Artificial Sequence; identical to SEQ ID NO: 2252
  Synthetic oligonucleotide

SEQ ID NO: 2518 - DNA, 36 bp, Artificial Sequence; identical to SEQ ID NO: 2253
  Synthetic oligonucleotide

SEQ ID NO: 2519 - DNA, 36 bp, Artificial Sequence; identical to SEQ ID NO: 2254
  Synthetic oligonucleotide

SEQ ID NO: 2520 - DNA, 35 bp, Artificial Sequence; identical to SEQ ID NO: 2255
  Synthetic oligonucleotide

SEQ ID NO: 2521 - DNA, 36 bp, Artificial Sequence; identical to SEQ ID NO: 2256
  Synthetic oligonucleotide

SEQ ID NO: 2522 - DNA, 35 bp, Artificial Sequence; identical to SEQ ID NO: 2257
  Synthetic oligonucleotide

SEQ ID NO: 2523 - DNA, 37 bp, Artificial Sequence; identical to SEQ ID NO: 2258
  Synthetic oligonucleotide

SEQ ID NO: 2524 - DNA, 36 bp, Artificial Sequence; identical to SEQ ID NO: 2259
  Synthetic oligonucleotide

SEQ ID NO: 2525 - DNA, 38 bp, Artificial Sequence; identical to SEQ ID NO: 2260
  Synthetic oligonucleotide

SEQ ID NO: 2526 - DNA, 35 bp, Artificial Sequence; identical to SEQ ID NO: 2261
  Synthetic oligonucleotide

SEQ ID NO: 2527 - DNA, 35 bp, Artificial Sequence; identical to SEQ ID NO: 2262
  Synthetic oligonucleotide

SEQ ID NO: 2528 - DNA, 36 bp, Artificial Sequence; identical to SEQ ID NO: 2263
  Synthetic oligonucleotide

SEQ ID NO: 2529 - DNA, 37 bp, Artificial Sequence; identical to SEQ ID NO: 2264
  Synthetic oligonucleotide

SEQ ID NO: 2530 - DNA, 35 bp, Artificial Sequence; identical to SEQ ID NO: 2265
  Synthetic oligonucleotide

SEQ ID NO: 2531 - DNA, 37 bp, Artificial Sequence; identical to SEQ ID NO: 2266
  Synthetic oligonucleotide

SEQ ID NO: 2532 - DNA, 35 bp, Artificial Sequence; identical to SEQ ID NO: 1892
  Synthetic oligonucleotide

SEQ ID NO: 2533 - DNA, 35 bp, Artificial Sequence; identical to SEQ ID NO: 2268
  Synthetic oligonucleotide

SEQ ID NO: 2534 - DNA, 35 bp, Artificial Sequence; identical to SEQ ID NO: 2269
  Synthetic oligonucleotide

SEQ ID NO: 2535 - DNA, 35 bp, Artificial Sequence; identical to SEQ ID NO: 2270
  Synthetic oligonucleotide

SEQ ID NO: 2536 - DNA, 36 bp, Artificial Sequence; identical to SEQ ID NO: 2271
  Synthetic oligonucleotide

SEQ ID NO: 2537 - DNA, 38 bp, Artificial Sequence; identical to SEQ ID NO: 2272
  Synthetic oligonucleotide

SEQ ID NO: 2538 - DNA, 36 bp, Artificial Sequence; identical to SEQ ID NO: 1651
  Synthetic oligonucleotide

SEQ ID NO: 2539 - DNA, 37 bp, Artificial Sequence; identical to SEQ ID NO: 2274
  Synthetic oligonucleotide

SEQ ID NO: 2540 - DNA, 37 bp, Artificial Sequence; identical to SEQ ID NO: 2275
  Synthetic oligonucleotide

SEQ ID NO: 2541 - DNA, 38 bp, Artificial Sequence; identical to SEQ ID NO: 2276
  Synthetic oligonucleotide

SEQ ID NO: 2542 - DNA, 35 bp, Artificial Sequence; identical to SEQ ID NO: 2277
  Synthetic oligonucleotide

SEQ ID NO: 2543 - DNA, 37 bp, Artificial Sequence; identical to SEQ ID NO: 2278
  Synthetic oligonucleotide

SEQ ID NO: 2544 - DNA, 35 bp, Artificial Sequence; identical to SEQ ID NO: 2279
  Synthetic oligonucleotide

SEQ ID NO: 2545 - DNA, 35 bp, Artificial Sequence; identical to SEQ ID NO: 1918
  Synthetic oligonucleotide

SEQ ID NO: 2546 - DNA, 37 bp, Artificial Sequence; identical to SEQ ID NO: 2281
  Synthetic oligonucleotide

SEQ ID NO: 2547 - DNA, 36 bp, Artificial Sequence; identical to SEQ ID NO: 2282
  Synthetic oligonucleotide

SEQ ID NO: 2548 - DNA, 35 bp, Artificial Sequence; identical to SEQ ID NO: 2283
  Synthetic oligonucleotide

SEQ ID NO: 2549 - DNA, 36 bp, Artificial Sequence; identical to SEQ ID NO: 2284
  Synthetic oligonucleotide

SEQ ID NO: 2550 - DNA, 38 bp, Artificial Sequence; identical to SEQ ID NO: 2285
  Synthetic oligonucleotide

SEQ ID NO: 2551 - DNA, 37 bp, Artificial Sequence; identical to SEQ ID NO: 2286
  Synthetic oligonucleotide

SEQ ID NO: 2552 - DNA, 37 bp, Artificial Sequence; identical to SEQ ID NO: 2287
  Synthetic oligonucleotide

SEQ ID NO: 2553 - DNA, 35 bp, Artificial Sequence; identical to SEQ ID NO: 2288
  Synthetic oligonucleotide

SEQ ID NO: 2554 - DNA, 37 bp, Artificial Sequence; identical to SEQ ID NO: 2289
  Synthetic oligonucleotide

SEQ ID NO: 2555 - DNA, 37 bp, Artificial Sequence; identical to SEQ ID NO: 1939
  Synthetic oligonucleotide

SEQ ID NO: 2556 - DNA, 37 bp, Artificial Sequence; identical to SEQ ID NO: 2291
  Synthetic oligonucleotide

SEQ ID NO: 2557 - DNA, 37 bp, Artificial Sequence; identical to SEQ ID NO: 2292
  Synthetic oligonucleotide

SEQ ID NO: 2558 - DNA, 37 bp, Artificial Sequence; identical to SEQ ID NO: 2293
  Synthetic oligonucleotide

SEQ ID NO: 2559 - DNA, 35 bp, Artificial Sequence; identical to SEQ ID NO: 2294
  Synthetic oligonucleotide

SEQ ID NO: 2560 - DNA, 38 bp, Artificial Sequence; identical to SEQ ID NO: 2295
  Synthetic oligonucleotide

SEQ ID NO: 2561 - DNA, 36 bp, Artificial Sequence; identical to SEQ ID NO: 2296
  Synthetic oligonucleotide

SEQ ID NO: 2562 - DNA, 36 bp, Artificial Sequence; identical to SEQ ID NO: 1719
  Synthetic oligonucleotide

SEQ ID NO: 2563 - DNA, 36 bp, Artificial Sequence; identical to SEQ ID NO: 2298
  Synthetic oligonucleotide

SEQ ID NO: 2564 - DNA, 37 bp, Artificial Sequence; identical to SEQ ID NO: 2299
  Synthetic oligonucleotide

SEQ ID NO: 2565 - DNA, 38 bp, Artificial Sequence; identical to SEQ ID NO: 2300
  Synthetic oligonucleotide

SEQ ID NO: 2566 - DNA, 35 bp, Artificial Sequence; identical to SEQ ID NO: 2301
  Synthetic oligonucleotide

SEQ ID NO: 2567 - DNA, 35 bp, Artificial Sequence; identical to SEQ ID NO: 2302
  Synthetic oligonucleotide

SEQ ID NO: 2568 - DNA, 36 bp, Artificial Sequence; identical to SEQ ID NO: 2303
  Synthetic oligonucleotide

SEQ ID NO: 2569 - DNA, 38 bp, Artificial Sequence; identical to SEQ ID NO: 2304
  Synthetic oligonucleotide

SEQ ID NO: 2570 - DNA, 36 bp, Artificial Sequence; identical to SEQ ID NO: 2305
  Synthetic oligonucleotide

SEQ ID NO: 2571 - DNA, 38 bp, Artificial Sequence; identical to SEQ ID NO: 2306
  Synthetic oligonucleotide

SEQ ID NO: 2572 - DNA, 36 bp, Artificial Sequence; identical to SEQ ID NO: 2307
  Synthetic oligonucleotide

SEQ ID NO: 2573 - DNA, 35 bp, Artificial Sequence; identical to SEQ ID NO: 2308
  Synthetic oligonucleotide

SEQ ID NO: 2574 - DNA, 38 bp, Artificial Sequence; identical to SEQ ID NO: 2309
  Synthetic oligonucleotide

SEQ ID NO: 2575 - DNA, 36 bp, Artificial Sequence; identical to SEQ ID NO: 2310
  Synthetic oligonucleotide

SEQ ID NO: 2576 - DNA, 38 bp, Artificial Sequence; identical to SEQ ID NO: 2311
  Synthetic oligonucleotide

SEQ ID NO: 2577 - DNA, 35 bp, Artificial Sequence; identical to SEQ ID NO: 2312
  Synthetic oligonucleotide

SEQ ID NO: 2578 - DNA, 36 bp, Artificial Sequence; identical to SEQ ID NO: 2313
  Synthetic oligonucleotide

SEQ ID NO: 2579 - DNA, 38 bp, Artificial Sequence; identical to SEQ ID NO: 2314
  Synthetic oligonucleotide

SEQ ID NO: 2580 - DNA, 35 bp, Artificial Sequence; identical to SEQ ID NO: 2315
  Synthetic oligonucleotide

SEQ ID NO: 2581 - DNA, 35 bp, Artificial Sequence; identical to SEQ ID NO: 2316
  Synthetic oligonucleotide

SEQ ID NO: 2582 - DNA, 38 bp, Artificial Sequence; identical to SEQ ID NO: 2317
  Synthetic oligonucleotide

SEQ ID NO: 2583 - DNA, 38 bp, Artificial Sequence; identical to SEQ ID NO: 2318
  Synthetic oligonucleotide

SEQ ID NO: 2584 - DNA, 38 bp, Artificial Sequence
  Synthetic oligonucleotide
atctatcgcctatcgctacaacccgtattcgcttctta

SEQ ID NO: 2585 - DNA, 38 bp, Artificial Sequence; identical to SEQ ID NO: 1543
  Synthetic oligonucleotide

SEQ ID NO: 2586 - DNA, 38 bp, Artificial Sequence; identical to SEQ ID NO: 1816
  Synthetic oligonucleotide

SEQ ID NO: 2587 - DNA, 38 bp, Artificial Sequence
  Synthetic oligonucleotide
attctctttattttatcgctttcatccagtgcatatga

SEQ ID NO: 2588 - DNA, 38 bp, Artificial Sequence; identical to SEQ ID NO: 1817
  Synthetic oligonucleotide

SEQ ID NO: 2589 - DNA, 35 bp, Artificial Sequence
  Synthetic oligonucleotide
ggcttcttatttgcttgaatatccgcttcctctct

SEQ ID NO: 2590 - DNA, 35 bp, Artificial Sequence; identical to SEQ ID NO: 1550
  Synthetic oligonucleotide

SEQ ID NO: 2591 - DNA, 35 bp, Artificial Sequence; identical to SEQ ID NO: 1551
  Synthetic oligonucleotide

SEQ ID NO: 2592 - DNA, 38 bp, Artificial Sequence; identical to SEQ ID NO: 1804
  Synthetic oligonucleotide

SEQ ID NO: 2593 - DNA, 37 bp, Artificial Sequence; identical to SEQ ID NO: 1820
  Synthetic oligonucleotide

SEQ ID NO: 2594 - DNA, 35 bp, Artificial Sequence; identical to SEQ ID NO: 2357
  Synthetic oligonucleotide

SEQ ID NO: 2595 - DNA, 37 bp, Artificial Sequence; identical to SEQ ID NO: 2055
  Synthetic oligonucleotide

SEQ ID NO: 2596 - DNA, 37 bp, Artificial Sequence; identical to SEQ ID NO: 2359
  Synthetic oligonucleotide

SEQ ID NO: 2597 - DNA, 36 bp, Artificial Sequence; identical to SEQ ID NO: 2360
  Synthetic oligonucleotide

SEQ ID NO: 2598 - DNA, 38 bp, Artificial Sequence; identical to SEQ ID NO: 2361
  Synthetic oligonucleotide

SEQ ID NO: 2599 - DNA, 36 bp, Artificial Sequence; identical to SEQ ID NO: 2362
  Synthetic oligonucleotide

SEQ ID NO: 2600 - DNA, 37 bp, Artificial Sequence; identical to SEQ ID NO: 2363
  Synthetic oligonucleotide

SEQ ID NO: 2601 - DNA, 38 bp, Artificial Sequence; identical to SEQ ID NO: 2364
  Synthetic oligonucleotide

SEQ ID NO: 2602 - DNA, 36 bp, Artificial Sequence; identical to SEQ ID NO: 2365
  Synthetic oligonucleotide

SEQ ID NO: 2603 - DNA, 37 bp, Artificial Sequence; identical to SEQ ID NO: 2366
  Synthetic oligonucleotide

SEQ ID NO: 2604 - DNA, 35 bp, Artificial Sequence; identical to SEQ ID NO: 2061
  Synthetic oligonucleotide

SEQ ID NO: 2605 - DNA, 38 bp, Artificial Sequence; identical to SEQ ID NO: 2024
  Synthetic oligonucleotide

SEQ ID NO: 2606 - DNA, 36 bp, Artificial Sequence; identical to SEQ ID NO: 2369
  Synthetic oligonucleotide

SEQ ID NO: 2607 - DNA, 35 bp, Artificial Sequence; identical to SEQ ID NO: 2330
  Synthetic oligonucleotide

SEQ ID NO: 2608 - DNA, 37 bp, Artificial Sequence; identical to SEQ ID NO: 2067
  Synthetic oligonucleotide

SEQ ID NO: 2609 - DNA, 35 bp, Artificial Sequence; identical to SEQ ID NO: 2372
  Synthetic oligonucleotide

SEQ ID NO: 2610 - DNA, 35 bp, Artificial Sequence; identical to SEQ ID NO: 2373
  Synthetic oligonucleotide

SEQ ID NO: 2611 - DNA, 36 bp, Artificial Sequence; identical to SEQ ID NO: 2374
  Synthetic oligonucleotide

SEQ ID NO: 2612 - DNA, 38 bp, Artificial Sequence; identical to SEQ ID NO: 2071
  Synthetic oligonucleotide

SEQ ID NO: 2613 - DNA, 35 bp, Artificial Sequence; identical to SEQ ID NO: 1597
  Synthetic oligonucleotide

SEQ ID NO: 2614 - DNA, 36 bp, Artificial Sequence; identical to SEQ ID NO: 1617
  Synthetic oligonucleotide

SEQ ID NO: 2615 - DNA, 36 bp, Artificial Sequence; identical to SEQ ID NO: 2378
  Synthetic oligonucleotide

SEQ ID NO: 2616 - DNA, 35 bp, Artificial Sequence; identical to SEQ ID NO: 1591
  Synthetic oligonucleotide

SEQ ID NO: 2617 - DNA, 36 bp, Artificial Sequence; identical to SEQ ID NO: 1590
  Synthetic oligonucleotide

SEQ ID NO: 2618 - DNA, 38 bp, Artificial Sequence; identical to SEQ ID NO: 2023
  Synthetic oligonucleotide

SEQ ID NO: 2619 - DNA, 36 bp, Artificial Sequence; identical to SEQ ID NO: 1586
  Synthetic oligonucleotide

SEQ ID NO: 2620 - DNA, 35 bp, Artificial Sequence; identical to SEQ ID NO: 1620
  Synthetic oligonucleotide

SEQ ID NO: 2621 - DNA, 35 bp, Artificial Sequence; identical to SEQ ID NO: 2384
  Synthetic oligonucleotide

SEQ ID NO: 2622 - DNA, 35 bp, Artificial Sequence; identical to SEQ ID NO: 1594
  Synthetic oligonucleotide

SEQ ID NO: 2623 - DNA, 37 bp, Artificial Sequence; identical to SEQ ID NO: 2386
  Synthetic oligonucleotide

SEQ ID NO: 2624 - DNA, 36 bp, Artificial Sequence; identical to SEQ ID NO: 2092
  Synthetic oligonucleotide

SEQ ID NO: 2625 - DNA, 35 bp, Artificial Sequence; identical to SEQ ID NO: 2388
  Synthetic oligonucleotide

SEQ ID NO: 2626 - DNA, 35 bp, Artificial Sequence; identical to SEQ ID NO: 2389
  Synthetic oligonucleotide

SEQ ID NO: 2627 - DNA, 36 bp, Artificial Sequence; identical to SEQ ID NO: 2390
  Synthetic oligonucleotide

SEQ ID NO: 2628 - DNA, 35 bp, Artificial Sequence; identical to SEQ ID NO: 1740
  Synthetic oligonucleotide

SEQ ID NO: 2629 - DNA, 37 bp, Artificial Sequence; identical to SEQ ID NO: 2094
  Synthetic oligonucleotide

SEQ ID NO: 2630 - DNA, 36 bp, Artificial Sequence; identical to SEQ ID NO: 2098
  Synthetic oligonucleotide

SEQ ID NO: 2631 - DNA, 37 bp, Artificial Sequence; identical to SEQ ID NO: 1587
  Synthetic oligonucleotide

SEQ ID NO: 2632 - DNA, 38 bp, Artificial Sequence; identical to SEQ ID NO: 2100
  Synthetic oligonucleotide

SEQ ID NO: 2633 - DNA, 35 bp, Artificial Sequence; identical to SEQ ID NO: 2396
  Synthetic oligonucleotide

SEQ ID NO: 2634 - DNA, 38 bp, Artificial Sequence; identical to SEQ ID NO: 2397
  Synthetic oligonucleotide

SEQ ID NO: 2635 - DNA, 38 bp, Artificial Sequence; identical to SEQ ID NO: 2398
  Synthetic oligonucleotide

SEQ ID NO: 2636 - DNA, 37 bp, Artificial Sequence; identical to SEQ ID NO: 2399
  Synthetic oligonucleotide

SEQ ID NO: 2637 - DNA, 37 bp, Artificial Sequence; identical to SEQ ID NO: 2400
  Synthetic oligonucleotide

SEQ ID NO: 2638 - DNA, 37 bp, Artificial Sequence; identical to SEQ ID NO: 2401
  Synthetic oligonucleotide

SEQ ID NO: 2639 - DNA, 38 bp, Artificial Sequence; identical to SEQ ID NO: 1596
  Synthetic oligonucleotide

SEQ ID NO: 2640 - DNA, 35 bp, Artificial Sequence; identical to SEQ ID NO: 2403
  Synthetic oligonucleotide

SEQ ID NO: 2641 - DNA, 35 bp, Artificial Sequence; identical to SEQ ID NO: 2114
  Synthetic oligonucleotide

SEQ ID NO: 2642 - DNA, 37 bp, Artificial Sequence; identical to SEQ ID NO: 2405
  Synthetic oligonucleotide

SEQ ID NO: 2643 - DNA, 35 bp, Artificial Sequence; identical to SEQ ID NO: 2120
  Synthetic oligonucleotide

SEQ ID NO: 2644 - DNA, 37 bp, Artificial Sequence; identical to SEQ ID NO: 2407
  Synthetic oligonucleotide

SEQ ID NO: 2645 - DNA, 37 bp, Artificial Sequence; identical to SEQ ID NO: 2408
  Synthetic oligonucleotide

SEQ ID NO: 2646 - DNA, 37 bp, Artificial Sequence; identical to SEQ ID NO: 2409
  Synthetic oligonucleotide

SEQ ID NO: 2647 - DNA, 35 bp, Artificial Sequence; identical to SEQ ID NO: 2410
  Synthetic oligonucleotide

SEQ ID NO: 2648 - DNA, 37 bp, Artificial Sequence; identical to SEQ ID NO: 1595
  Synthetic oligonucleotide

SEQ ID NO: 2649 - DNA, 35 bp, Artificial Sequence; identical to SEQ ID NO: 2412
  Synthetic oligonucleotide

SEQ ID NO: 2650 - DNA, 35 bp, Artificial Sequence; identical to SEQ ID NO: 2413
  Synthetic oligonucleotide

SEQ ID NO: 2651 - DNA, 37 bp, Artificial Sequence; identical to SEQ ID NO: 2414
  Synthetic oligonucleotide

SEQ ID NO: 2652 - DNA, 35 bp, Artificial Sequence; identical to SEQ ID NO: 2140
  Synthetic oligonucleotide

SEQ ID NO: 2653 - DNA, 35 bp, Artificial Sequence; identical to SEQ ID NO: 2014
  Synthetic oligonucleotide

SEQ ID NO: 2654 - DNA, 35 bp, Artificial Sequence; identical to SEQ ID NO: 1600
  Synthetic oligonucleotide

SEQ ID NO: 2655 - DNA, 36 bp, Artificial Sequence; identical to SEQ ID NO: 2143
  Synthetic oligonucleotide

SEQ ID NO: 2656 - DNA, 36 bp, Artificial Sequence; identical to SEQ ID NO: 2147
  Synthetic oligonucleotide

SEQ ID NO: 2657 - DNA, 36 bp, Artificial Sequence; identical to SEQ ID NO: 2151
  Synthetic oligonucleotide

SEQ ID NO: 2658 - DNA, 37 bp, Artificial Sequence; identical to SEQ ID NO: 2421
  Synthetic oligonucleotide

SEQ ID NO: 2659 - DNA, 36 bp, Artificial Sequence; identical to SEQ ID NO: 2422
  Synthetic oligonucleotide

SEQ ID NO: 2660 - DNA, 38 bp, Artificial Sequence; identical to SEQ ID NO: 2423
  Synthetic oligonucleotide

SEQ ID NO: 2661 - DNA, 38 bp, Artificial Sequence; identical to SEQ ID NO: 2424
  Synthetic oligonucleotide

SEQ ID NO: 2662 - DNA, 35 bp, Artificial Sequence; identical to SEQ ID NO: 2425
  Synthetic oligonucleotide

SEQ ID NO: 2663 - DNA, 38 bp, Artificial Sequence; identical to SEQ ID NO: 2426
  Synthetic oligonucleotide

SEQ ID NO: 2664 - DNA, 38 bp, Artificial Sequence; identical to SEQ ID NO: 1601
  Synthetic oligonucleotide

SEQ ID NO: 2665 - DNA, 36 bp, Artificial Sequence; identical to SEQ ID NO: 2428
  Synthetic oligonucleotide

SEQ ID NO: 2666 - DNA, 35 bp, Artificial Sequence; identical to SEQ ID NO: 1606
  Synthetic oligonucleotide

SEQ ID NO: 2667 - DNA, 37 bp, Artificial Sequence; identical to SEQ ID NO: 2166
  Synthetic oligonucleotide

SEQ ID NO: 2668 - DNA, 36 bp, Artificial Sequence; identical to SEQ ID NO: 1598
  Synthetic oligonucleotide

SEQ ID NO: 2669 - DNA, 38 bp, Artificial Sequence; identical to SEQ ID NO: 1772
  Synthetic oligonucleotide

SEQ ID NO: 2670 - DNA, 35 bp, Artificial Sequence; identical to SEQ ID NO: 2433
  Synthetic oligonucleotide

SEQ ID NO: 2671 - DNA, 36 bp, Artificial Sequence; identical to SEQ ID NO: 1602
  Synthetic oligonucleotide

SEQ ID NO: 2672 - DNA, 36 bp, Artificial Sequence; identical to SEQ ID NO: 1603
  Synthetic oligonucleotide

SEQ ID NO: 2673 - DNA, 35 bp, Artificial Sequence; identical to SEQ ID NO: 2436
  Synthetic oligonucleotide

SEQ ID NO: 2674 - DNA, 37 bp, Artificial Sequence; identical to SEQ ID NO: 2178
  Synthetic oligonucleotide

SEQ ID NO: 2675 - DNA, 36 bp, Artificial Sequence; identical to SEQ ID NO: 2048
  Synthetic oligonucleotide

SEQ ID NO: 2676 - DNA, 35 bp, Artificial Sequence; identical to SEQ ID NO: 1607
  Synthetic oligonucleotide

SEQ ID NO: 2677 - DNA, 36 bp, Artificial Sequence; identical to SEQ ID NO: 2440
  Synthetic oligonucleotide

SEQ ID NO: 2678 - DNA, 35 bp, Artificial Sequence; identical to SEQ ID NO: 2441
  Synthetic oligonucleotide

SEQ ID NO: 2679 - DNA, 35 bp, Artificial Sequence; identical to SEQ ID NO: 2442
  Synthetic oligonucleotide

SEQ ID NO: 2680 - DNA, 35 bp, Artificial Sequence; identical to SEQ ID NO: 2186
  Synthetic oligonucleotide

SEQ ID NO: 2681 - DNA, 38 bp, Artificial Sequence; identical to SEQ ID NO: 2444
  Synthetic oligonucleotide

SEQ ID NO: 2682 - DNA, 35 bp, Artificial Sequence; identical to SEQ ID NO: 2445
  Synthetic oligonucleotide

SEQ ID NO: 2683 - DNA, 38 bp, Artificial Sequence; identical to SEQ ID NO: 2446
  Synthetic oligonucleotide

SEQ ID NO: 2684 - DNA, 36 bp, Artificial Sequence; identical to SEQ ID NO: 1638
  Synthetic oligonucleotide

SEQ ID NO: 2685 - DNA, 36 bp, Artificial Sequence; identical to SEQ ID NO: 2038
  Synthetic oligonucleotide

SEQ ID NO: 2686 - DNA, 38 bp, Artificial Sequence; identical to SEQ ID NO: 1608
  Synthetic oligonucleotide

SEQ ID NO: 2687 - DNA, 35 bp, Artificial Sequence; identical to SEQ ID NO: 2450
  Synthetic oligonucleotide

SEQ ID NO: 2688 - DNA, 37 bp, Artificial Sequence; identical to SEQ ID NO: 1639
  Synthetic oligonucleotide

SEQ ID NO: 2689 - DNA, 38 bp, Artificial Sequence; identical to SEQ ID NO: 2452
  Synthetic oligonucleotide

SEQ ID NO: 2690 - DNA, 38 bp, Artificial Sequence; identical to SEQ ID NO: 2453
  Synthetic oligonucleotide

SEQ ID NO: 2691 - DNA, 38 bp, Artificial Sequence; identical to SEQ ID NO: 2454
  Synthetic oligonucleotide

SEQ ID NO: 2692 - DNA, 36 bp, Artificial Sequence; identical to SEQ ID NO: 2455
  Synthetic oligonucleotide

SEQ ID NO: 2693 - DNA, 36 bp, Artificial Sequence; identical to SEQ ID NO: 2456
  Synthetic oligonucleotide

SEQ ID NO: 2694 - DNA, 36 bp, Artificial Sequence; identical to SEQ ID NO: 1604
  Synthetic oligonucleotide

SEQ ID NO: 2695 - DNA, 36 bp, Artificial Sequence; identical to SEQ ID NO: 2458
  Synthetic oligonucleotide

SEQ ID NO: 2696 - DNA, 37 bp, Artificial Sequence; identical to SEQ ID NO: 2459
  Synthetic oligonucleotide

SEQ ID NO: 2697 - DNA, 35 bp, Artificial Sequence; identical to SEQ ID NO: 2460
  Synthetic oligonucleotide

SEQ ID NO: 2698 - DNA, 36 bp, Artificial Sequence; identical to SEQ ID NO: 2461
  Synthetic oligonucleotide

SEQ ID NO: 2699 - DNA, 35 bp, Artificial Sequence; identical to SEQ ID NO: 2462
  Synthetic oligonucleotide

SEQ ID NO: 2700 - DNA, 37 bp, Artificial Sequence; identical to SEQ ID NO: 2463
  Synthetic oligonucleotide

SEQ ID NO: 2701 - DNA, 36 bp, Artificial Sequence; identical to SEQ ID NO: 1750
  Synthetic oligonucleotide

SEQ ID NO: 2702 - DNA, 36 bp, Artificial Sequence; identical to SEQ ID NO: 2465
  Synthetic oligonucleotide

SEQ ID NO: 2703 - DNA, 35 bp, Artificial Sequence; identical to SEQ ID NO: 2466
  Synthetic oligonucleotide

SEQ ID NO: 2704 - DNA, 37 bp, Artificial Sequence; identical to SEQ ID NO: 2209
  Synthetic oligonucleotide

SEQ ID NO: 2705 - DNA, 36 bp, Artificial Sequence; identical to SEQ ID NO: 2468
  Synthetic oligonucleotide

SEQ ID NO: 2706 - DNA, 38 bp, Artificial Sequence; identical to SEQ ID NO: 1609
  Synthetic oligonucleotide

SEQ ID NO: 2707 - DNA, 38 bp, Artificial Sequence; identical to SEQ ID NO: 2470
  Synthetic oligonucleotide

SEQ ID NO: 2708 - DNA, 38 bp, Artificial Sequence; identical to SEQ ID NO: 2218
  Synthetic oligonucleotide

SEQ ID NO: 2709 - DNA, 35 bp, Artificial Sequence; identical to SEQ ID NO: 2472
  Synthetic oligonucleotide

SEQ ID NO: 2710 - DNA, 37 bp, Artificial Sequence; identical to SEQ ID NO: 2473
  Synthetic oligonucleotide

SEQ ID NO: 2711 - DNA, 36 bp, Artificial Sequence; identical to SEQ ID NO: 2474
  Synthetic oligonucleotide

SEQ ID NO: 2712 - DNA, 35 bp, Artificial Sequence; identical to SEQ ID NO: 1644
  Synthetic oligonucleotide

SEQ ID NO: 2713 - DNA, 36 bp, Artificial Sequence; identical to SEQ ID NO: 2476
  Synthetic oligonucleotide

SEQ ID NO: 2714 - DNA, 35 bp, Artificial Sequence; identical to SEQ ID NO: 2477
  Synthetic oligonucleotide

SEQ ID NO: 2715 - DNA, 38 bp, Artificial Sequence; identical to SEQ ID NO: 2341
  Synthetic oligonucleotide

SEQ ID NO: 2716 - DNA, 36 bp, Artificial Sequence; identical to SEQ ID NO: 2479
  Synthetic oligonucleotide

SEQ ID NO: 2717 - DNA, 38 bp, Artificial Sequence; identical to SEQ ID NO: 2480
  Synthetic oligonucleotide

SEQ ID NO: 2718 - DNA, 37 bp, Artificial Sequence; identical to SEQ ID NO: 2481
  Synthetic oligonucleotide

SEQ ID NO: 2719 - DNA, 36 bp, Artificial Sequence; identical to SEQ ID NO: 2482
  Synthetic oligonucleotide

SEQ ID NO: 2720 - DNA, 36 bp, Artificial Sequence; identical to SEQ ID NO: 2483
  Synthetic oligonucleotide

SEQ ID NO: 2721 - DNA, 35 bp, Artificial Sequence; identical to SEQ ID NO: 2484
  Synthetic oligonucleotide

SEQ ID NO: 2722 - DNA, 38 bp, Artificial Sequence; identical to SEQ ID NO: 2485
  Synthetic oligonucleotide

SEQ ID NO: 2723 - DNA, 36 bp, Artificial Sequence; identical to SEQ ID NO: 1611
  Synthetic oligonucleotide

SEQ ID NO: 2724 - DNA, 35 bp, Artificial Sequence; identical to SEQ ID NO: 2487
  Synthetic oligonucleotide

SEQ ID NO: 2725 - DNA, 35 bp, Artificial Sequence; identical to SEQ ID NO: 1605
  Synthetic oligonucleotide

SEQ ID NO: 2726 - DNA, 36 bp, Artificial Sequence; identical to SEQ ID NO: 2489
  Synthetic oligonucleotide

SEQ ID NO: 2727 - DNA, 37 bp, Artificial Sequence; identical to SEQ ID NO: 1649
  Synthetic oligonucleotide

SEQ ID NO: 2728 - DNA, 35 bp, Artificial Sequence; identical to SEQ ID NO: 1599
  Synthetic oligonucleotide

SEQ ID NO: 2729 - DNA, 36 bp, Artificial Sequence
  Synthetic oligonucleotide
aattgtgaatcacaactcctggtatataggctttga

SEQ ID NO: 2730 - DNA, 36 bp, Artificial Sequence
  Synthetic oligonucleotide
cggcatacgaacctgtctcaaatcctagtaaggtaa

SEQ ID NO: 2731 - DNA, 36 bp, Artificial Sequence
  Synthetic oligonucleotide
agttgtgaaacacaactcctggtatataggctttga

SEQ ID NO: 2732 - DNA, 36 bp, Artificial Sequence
  Synthetic oligonucleotide
gagcttgatatcatcttccacttcttcgctattcta

SEQ ID NO: 2733 - DNA, 38 bp, Artificial Sequence
  Synthetic oligonucleotide
ggtcataatgtgaatcatgaatagtactaatttactga

SEQ ID NO: 2734 - DNA, 36 bp, Artificial Sequence
  Synthetic oligonucleotide
tggcggctcacgtattctgaaagttagtggtgcgga

SEQ ID NO: 2735 - DNA, 37 bp, Artificial Sequence
  Synthetic oligonucleotide
tagctcatgggttgcatcctcaggataactccgctga

SEQ ID NO: 2736 - DNA, 35 bp, Artificial Sequence
  Synthetic oligonucleotide
tcttattttcgcaagatcttttatctaaatacaat

SEQ ID NO: 2737 - DNA, 38 bp, Artificial Sequence
  Synthetic oligonucleotide
tttcgaccattgtgggatttccggcggtccaattatga

SEQ ID NO: 2738 - DNA, 38 bp, Artificial Sequence
  Synthetic oligonucleotide
actaggaagaacaggtacgtagggacacctgacagtga

SEQ ID NO: 2739 - DNA, 37 bp, Artificial Sequence
  Synthetic oligonucleotide
gacagctatcaacgaccgacaacggaaattggtgtga

SEQ ID NO: 2740 - DNA, 37 bp, Artificial Sequence
  Synthetic oligonucleotide
gggcgtcccttgcgttctctcaacgaatgtgtcgcga

SEQ ID NO: 2741 - DNA, 38 bp, Artificial Sequence
  Synthetic oligonucleotide
tggcgggcgtgggtgttgccgagacgtcagtaccgtga

SEQ ID NO: 2742 - DNA, 37 bp, Artificial Sequence
  Synthetic oligonucleotide
tggagcggcgagttggaatcctgatgtgggctcatga

SEQ ID NO: 2743 - DNA, 38 bp, Artificial Sequence
  Synthetic oligonucleotide
atagataaatggggaggtcgcgcattgaatgatggtga

SEQ ID NO: 2744 - DNA, 38 bp, Artificial Sequence
  Synthetic oligonucleotide
gccgtatgattaagcgatctctggcatatggcatctga

SEQ ID NO: 2745 - DNA, 38 bp, Artificial Sequence
  Synthetic oligonucleotide
tctcgaagttccgtttagccccaaggtcgcgggcgtga

SEQ ID NO: 2746 - DNA, 37 bp, Artificial Sequence
  Synthetic oligonucleotide
aaccgggtgtccaaaccgtaatttaatgtttctggga

SEQ ID NO: 2747 - DNA, 37 bp, Artificial Sequence
  Synthetic oligonucleotide
aaccgggcgtccaaaccgtaatttaatgtttctggga

SEQ ID NO: 2748 - DNA, 35 bp, Artificial Sequence
  Synthetic oligonucleotide
ataattcgcgtccggtccttggaaataaacggcgt

SEQ ID NO: 2749 - DNA, 35 bp, Artificial Sequence
  Synthetic oligonucleotide
gggcggcctcgttttatcgggaaaaggaacaaagt

SEQ ID NO: 2750 - DNA, 35 bp, Artificial Sequence
  Synthetic oligonucleotide
gggcggcctcgttttatcgggaaaaggaacaatat

SEQ ID NO: 2751 - DNA, 35 bp, Artificial Sequence
  Synthetic oligonucleotide
gggcggcctcgttttatcgggaaaaggaacaatct

SEQ ID NO: 2752 - DNA, 36 bp, Artificial Sequence
  Synthetic oligonucleotide
tggctgctggacgcgtcttacagccgaccacatcaa

SEQ ID NO: 2753 - DNA, 38 bp, Artificial Sequence
  Synthetic oligonucleotide
tagccctaattgcgcttcttagcagggctcgtggttga

SEQ ID NO: 2754 - DNA, 35 bp, Artificial Sequence
  Synthetic oligonucleotide
tttaggctttagggtacgacagcaataggtacaaa

SEQ ID NO: 2755 - DNA, 38 bp, Artificial Sequence
  Synthetic oligonucleotide
atagataaatggggagagcgcgcattgaatgatggtga

SEQ ID NO: 2756 - DNA, 35 bp, Artificial Sequence
  Synthetic oligonucleotide
gagagaagtatttgttaagccacatagttttcata

SEQ ID NO: 2757 - DNA, 35 bp, Artificial Sequence
  Synthetic oligonucleotide
gagagaagtatttgttaagccacatagttttcatc

SEQ ID NO: 2758 - DNA, 36 bp, Artificial Sequence; identical to SEQ ID NO: 2732
  Synthetic oligonucleotide

SEQ ID NO: 2759 - DNA, 35 bp, Artificial Sequence
  Synthetic oligonucleotide
tcttattttagcaagatcttttatctaaataaact

SEQ ID NO: 2760 - DNA, 35 bp, Artificial Sequence
  Synthetic oligonucleotide
tcttattttagcaagatcttttatctaaatacctt

SEQ ID NO: 2761 - DNA, 35 bp, Artificial Sequence
  Synthetic oligonucleotide
tcttattttagcaagatcttttatctaaatactaa

SEQ ID NO: 2762 - DNA, 35 bp, Artificial Sequence
  Synthetic oligonucleotide
tcttattttagcaagatcttttatctaaatactag

SEQ ID NO: 2763 - DNA, 37 bp, Artificial Sequence
  Synthetic oligonucleotide
tgggaggttcagaagtctttggccttgatctgcagga

SEQ ID NO: 2764 - DNA, 36 bp, Artificial Sequence
  Synthetic oligonucleotide
accaccaaatccccaaccacttttccgcttatccca

SEQ ID NO: 2765 - DNA, 35 bp, Artificial Sequence
  Synthetic oligonucleotide
catgcagccccacaccgcttttatattgttttctc

SEQ ID NO: 2766 - DNA, 35 bp, Artificial Sequence
  Synthetic oligonucleotide
catgcataggctcactcctggaacactacctttat

SEQ ID NO: 2767 - DNA, 36 bp, Artificial Sequence
  Synthetic oligonucleotide
caacagtcatgtcaccctattatttgctttcattca

SEQ ID NO: 2768 - DNA, 36 bp, Artificial Sequence
  Synthetic oligonucleotide
catgccatatgtcccatcacttacctaccatcccta

SEQ ID NO: 2769 - DNA, 35 bp, Artificial Sequence
  Synthetic oligonucleotide
catgcgatccaatcctatagtccttggaccttata

SEQ ID NO: 2770 - DNA, 35 bp, Artificial Sequence
  Synthetic oligonucleotide
catgcgatccctcacacaactttcatcccaatacc

SEQ ID NO: 2771 - DNA, 35 bp, Artificial Sequence
  Synthetic oligonucleotide
cttgcgatattaactttccatcactttccttcttt

SEQ ID NO: 2772 - DNA, 35 bp, Artificial Sequence
  Synthetic oligonucleotide
catgcgccgatacccatttcccaattcctcttcaa

SEQ ID NO: 2773 - DNA, 35 bp, Artificial Sequence
  Synthetic oligonucleotide
cactgccacgtcaaatgcctctttcatttccattt

SEQ ID NO: 2774 - DNA, 36 bp, Artificial Sequence
  Synthetic oligonucleotide
cactgcggtcgagcctcctaattgttctcaccctta

SEQ ID NO: 2775 - DNA, 38 bp, Artificial Sequence
  Synthetic oligonucleotide
cgaacagtggtacacgacgtagtgcactctttttatga

SEQ ID NO: 2776 - DNA, 35 bp, Artificial Sequence
  Synthetic oligonucleotide
attgatctgcatgtgccattttcccacctttgttt

SEQ ID NO: 2777 - DNA, 35 bp, Artificial Sequence
  Synthetic oligonucleotide
gcacatgcgtactctcattaacttcattaccatcc

SEQ ID NO: 2778 - DNA, 35 bp, Artificial Sequence
  Synthetic oligonucleotide
gcgattacccactcttgtaaactaatttgcccatt

SEQ ID NO: 2779 - DNA, 38 bp, Artificial Sequence
  Synthetic oligonucleotide
gagacacgccactctcacgacacgttccttatttctga

SEQ ID NO: 2780 - DNA, 35 bp, Artificial Sequence; identical to SEQ ID NO: 452
  Synthetic oligonucleotide

SEQ ID NO: 2781 - DNA, 34 bp, Artificial Sequence
  Synthetic oligonucleotide
gccacaacacaattcttccgccatcactgcccaa

SEQ ID NO: 2782 - DNA, 35 bp, Artificial Sequence
  Synthetic oligonucleotide
gcctgaccacccgtataatttaccgcctaaacctt

SEQ ID NO: 2783 - DNA, 34 bp, Artificial Sequence; identical to SEQ ID NO: 161
  Synthetic oligonucleotide

SEQ ID NO: 2784 - DNA, 36 bp, Artificial Sequence
  Synthetic oligonucleotide
tacgactcatacttccattccgcctaaccttttcca

SEQ ID NO: 2785 - DNA, 35 bp, Artificial Sequence
  Synthetic oligonucleotide
gcgtatcaccatggctcacttttcctatctccttt

SEQ ID NO: 2786 - DNA, 35 bp, Artificial Sequence
  Synthetic oligonucleotide
ggccacgtaacagctactcaacgcgcaacactaac

SEQ ID NO: 2787 - DNA, 36 bp, Artificial Sequence
  Synthetic oligonucleotide
gcggccacactttgccttcttattcgttaattccta

SEQ ID NO: 2788 - DNA, 35 bp, Artificial Sequence
  Synthetic oligonucleotide
tgctgtcaacgcgaagatctttctcttttattctt

SEQ ID NO: 2789 - DNA, 35 bp, Artificial Sequence
  Synthetic oligonucleotide
tatgcggcgaacgccttctatttcctggttctctt

SEQ ID NO: 2790 - DNA, 35 bp, Artificial Sequence
  Synthetic oligonucleotide
tatgccccacgataatttcctctttttgcatattt

SEQ ID NO: 2791 - DNA, 36 bp, Artificial Sequence; identical to SEQ ID NO: 570
  Synthetic oligonucleotide

SEQ ID NO: 2792 - DNA, 36 bp, Artificial Sequence
  Synthetic oligonucleotide
acaccacgcctctgccggtggacgtactgcccatta

SEQ ID NO: 2793 - DNA, 38 bp, Artificial Sequence
  Synthetic oligonucleotide
gccacgtagaacacccatcctgatccatacaatactga

SEQ ID NO: 2794 - DNA, 35 bp, Artificial Sequence; identical to SEQ ID NO: 778
  Synthetic oligonucleotide

SEQ ID NO: 2795 - DNA, 36 bp, Artificial Sequence
  Synthetic oligonucleotide
acgcacgtgcagtcgtatcccgtttcttgcgcttta

SEQ ID NO: 2796 - DNA, 35 bp, Artificial Sequence
  Synthetic oligonucleotide
gacctagaagagggcgcttaaaattgggagtggtt

SEQ ID NO: 2797 - DNA, 35 bp, Artificial Sequence
  Synthetic oligonucleotide
atgcactacgcagatgcaaactatctttcgccttc

SEQ ID NO: 2798 - DNA, 35 bp, Artificial Sequence; identical to SEQ ID NO: 429
  Synthetic oligonucleotide

SEQ ID NO: 2799 - DNA, 38 bp, Artificial Sequence
  Synthetic oligonucleotide
gatgtagctgccacgagtgcgtatactcctttatctga

SEQ ID NO: 2800 - DNA, 36 bp, Artificial Sequence
  Synthetic oligonucleotide
gcccagctgcggtcacttgcccagccattccaccaa

SEQ ID NO: 2801 - DNA, 35 bp, Artificial Sequence; identical to SEQ ID NO: 452
  Synthetic oligonucleotide

SEQ ID NO: 2802 - DNA, 34 bp, Artificial Sequence; identical to SEQ ID NO: 161
  Synthetic oligonucleotide

SEQ ID NO: 2803 - DNA, 35 bp, Artificial Sequence
  Synthetic oligonucleotide
gccgagtcaatcaagctcggattacagtgtttacc

SEQ ID NO: 2804 - DNA, 35 bp, Artificial Sequence
  Synthetic oligonucleotide
tactgcaggtacagagtatcttcatccacctccat

SEQ ID NO: 2805 - DNA, 36 bp, Artificial Sequence
  Synthetic oligonucleotide
ggtgccgttgaggtatacggaccgtgcaggccatca

SEQ ID NO: 2806 - DNA, 36 bp, Artificial Sequence; identical to SEQ ID NO: 706
  Synthetic oligonucleotide

SEQ ID NO: 2807 - DNA, 35 bp, Artificial Sequence
  Synthetic oligonucleotide
gtcgtgcgaggtcaagtactcctattctctctaaa

SEQ ID NO: 2808 - DNA, 38 bp, Artificial Sequence
  Synthetic oligonucleotide
tggagggccgagtggtgggggtttgagaagcattatga

SEQ ID NO: 2809 - DNA, 37 bp, Artificial Sequence
  Synthetic oligonucleotide
tcacgacgtacaaaggttggcgtacttaccttactga

SEQ ID NO: 2810 - DNA, 35 bp, Artificial Sequence
  Synthetic oligonucleotide
tgcactgtaggtcatttcgtttacttgccaccatc

SEQ ID NO: 2811 - DNA, 36 bp, Artificial Sequence
  Synthetic oligonucleotide
tgtaacagcagtcgcggggaattattggctcttgaa

SEQ ID NO: 2812 - DNA, 36 bp, Artificial Sequence
  Synthetic oligonucleotide
tgtacaagtcagacgcgcccaaccctgtttacacta

SEQ ID NO: 2813 - DNA, 38 bp, Artificial Sequence
  Synthetic oligonucleotide
tgtacacctgcaatgcgtggtattactttgttccttga

SEQ ID NO: 2814 - DNA, 38 bp, Artificial Sequence
  Synthetic oligonucleotide
tccacatgccgttgaactctttattccctttaccttga

SEQ ID NO: 2815 - DNA, 35 bp, Artificial Sequence
  Synthetic oligonucleotide
ttggtacccgatagaatctagtttttgtagccaag

SEQ ID NO: 2816 - DNA, 35 bp, Artificial Sequence
  Synthetic oligonucleotide
acggacatgcgagcaacaatgaacgtctttttttc

SEQ ID NO: 2817 - DNA, 36 bp, Artificial Sequence
  Synthetic oligonucleotide
aaccacgaaggtacggacacactttacataccctta

SEQ ID NO: 2818 - DNA, 38 bp, Artificial Sequence
  Synthetic oligonucleotide
atgtacgcggtacccatcacacactatgtgtcccttga

SEQ ID NO: 2819 - DNA, 35 bp, Artificial Sequence
  Synthetic oligonucleotide
agtcacacaagcctccgattcattcttctaaacat

SEQ ID NO: 2820 - DNA, 38 bp, Artificial Sequence
  Synthetic oligonucleotide
catgcgcaggtatcttgctacactattctcccgtttga

SEQ ID NO: 2821 - DNA, 36 bp, Artificial Sequence
  Synthetic oligonucleotide
atgcgcacccgctatctacccgtgacacacgcctta

SEQ ID NO: 2822 - DNA, 35 bp, Artificial Sequence
  Synthetic oligonucleotide
atctcgaaccaccaccttccatcccttatgttgtc

SEQ ID NO: 2823 - DNA, 35 bp, Artificial Sequence
  Synthetic oligonucleotide
gcgaaccggaacttaatatccttgtaaccgctatc

SEQ ID NO: 2824 - DNA, 36 bp, Artificial Sequence
  Synthetic oligonucleotide
gcaacccgacctcgctccaaccgcttacgactccta

SEQ ID NO: 2825 - DNA, 36 bp, Artificial Sequence
  Synthetic oligonucleotide
gcaccccacatcccacgatcccatggatacccgcca

SEQ ID NO: 2826 - DNA, 36 bp, Artificial Sequence
  Synthetic oligonucleotide
gccaacctcaccaccggtacgccttatcgctaatta

SEQ ID NO: 2827 - DNA, 35 bp, Artificial Sequence
  Synthetic oligonucleotide
tcagtaccgccattcccaaaaatttttccccaaca

SEQ ID NO: 2828 - DNA, 35 bp, Artificial Sequence
  Synthetic oligonucleotide
tgaagccagctgacgtacatccacatattccctac

SEQ ID NO: 2829 - DNA, 36 bp, Artificial Sequence
  Synthetic oligonucleotide
tcaaccaactcaccctcatttactcgcataacatta

SEQ ID NO: 2830 - DNA, 35 bp, Artificial Sequence
  Synthetic oligonucleotide
tatgcccgcctgactctcttattactggttccgac

SEQ ID NO: 2831 - DNA, 36 bp, Artificial Sequence
  Synthetic oligonucleotide
actgctggcaccgcaatctacctaaagtttccgtta

SEQ ID NO: 2832 - DNA, 35 bp, Artificial Sequence
  Synthetic oligonucleotide
accacgcactcaggttcatgcatcttgaactttac

SEQ ID NO: 2833 - DNA, 36 bp, Artificial Sequence
  Synthetic oligonucleotide
gaccgtcgcaggccgtggctagcaggacgttggcta

SEQ ID NO: 2834 - DNA, 38 bp, Artificial Sequence
  Synthetic oligonucleotide
gacgaacgtgctgttggtattttttgaactcttattga

SEQ ID NO: 2835 - DNA, 37 bp, Artificial Sequence
  Synthetic oligonucleotide
gacatcctggaggtcctaactgcggtctcacacttga

SEQ ID NO: 2836 - DNA, 35 bp, Artificial Sequence
  Synthetic oligonucleotide
atgccggggtcacgacgttaccgcactccatctat

SEQ ID NO: 2837 - DNA, 35 bp, Artificial Sequence
  Synthetic oligonucleotide
atcagcaacgcccagtggtgcaagctttacccttt

SEQ ID NO: 2838 - DNA, 36 bp, Artificial Sequence
  Synthetic oligonucleotide
gactaccgtacgtgcatggcccccagttacacaata

SEQ ID NO: 2839 - DNA, 35 bp, Artificial Sequence
  Synthetic oligonucleotide
tacctcaaccgcgaactttgctacgttttgtaggg

SEQ ID NO: 2840 - DNA, 35 bp, Artificial Sequence
  Synthetic oligonucleotide
tacgctgtcgtgtgaggccctaccgctcccctatc

SEQ ID NO: 2841 - DNA, 35 bp, Artificial Sequence
  Synthetic oligonucleotide
gtcacggaagcagttacgaacgatgcccttccatc

SEQ ID NO: 2842 - DNA, 36 bp, Artificial Sequence; identical to SEQ ID NO: 2811
  Synthetic oligonucleotide

SEQ ID NO: 2843 - DNA, 35 bp, Artificial Sequence
  Synthetic oligonucleotide
ttgtgacgtctcgtgcgcattaccggttaatattt

SEQ ID NO: 2844 - DNA, 35 bp, Artificial Sequence; identical to SEQ ID NO: 2815
  Synthetic oligonucleotide

SEQ ID NO: 2845 - DNA, 35 bp, Artificial Sequence
  Synthetic oligonucleotide
tttaacgtagtgagtcaccattgatcctttaattt

SEQ ID NO: 2846 - DNA, 35 bp, Artificial Sequence
  Synthetic oligonucleotide
acccacgcctaccctaatccttgtctgttattttc

SEQ ID NO: 2847 - DNA, 36 bp, Artificial Sequence
  Synthetic oligonucleotide
catgccgaataatctctttcgttcctggtcctttta

SEQ ID NO: 2848 - DNA, 37 bp, Artificial Sequence
  Synthetic oligonucleotide
catgccgccaaaccacactgttccgtcttacttatga

SEQ ID NO: 2849 - DNA, 35 bp, Artificial Sequence
  Synthetic oligonucleotide
catgcgaacaacctttaccattcactagcacccct

SEQ ID NO: 2850 - DNA, 38 bp, Artificial Sequence
  Synthetic oligonucleotide
catgcgacacgctctatcgctttcacatcttcgcttga

SEQ ID NO: 2851 - DNA, 35 bp, Artificial Sequence; identical to SEQ ID NO: 2770
  Synthetic oligonucleotide

SEQ ID NO: 2852 - DNA, 35 bp, Artificial Sequence
  Synthetic oligonucleotide
catgcgcactttcctcacatgataccctgcatgac

SEQ ID NO: 2853 - DNA, 35 bp, Artificial Sequence
  Synthetic oligonucleotide
catgcgcatccaatcacactttttaatttcatttc

SEQ ID NO: 2854 - DNA, 35 bp, Artificial Sequence
  Synthetic oligonucleotide
atgcctagcagccaagcaatgcctttcatttattc

SEQ ID NO: 2855 - DNA, 36 bp, Artificial Sequence
  Synthetic oligonucleotide
gccgcagccatcatctacgcttcacactcatcacca

SEQ ID NO: 2856 - DNA, 36 bp, Artificial Sequence
  Synthetic oligonucleotide
ggtacgcaggcgcgatttgtacatttttgatcctga

SEQ ID NO: 2857 - DNA, 38 bp, Artificial Sequence
  Synthetic oligonucleotide
tctaacgtactatcatgtgccacgccttcatttcctga

SEQ ID NO: 2858 - DNA, 35 bp, Artificial Sequence
  Synthetic oligonucleotide
tcaactgccaccgaccccaacccgcgacccatcct

SEQ ID NO: 2859 - DNA, 36 bp, Artificial Sequence; identical to SEQ ID NO: 368
  Synthetic oligonucleotide

SEQ ID NO: 2860 - DNA, 36 bp, Artificial Sequence
  Synthetic oligonucleotide
cgcgagccagggtactgcctgcggtctaaacaataa

SEQ ID NO: 2861 - DNA, 36 bp, Artificial Sequence; identical to SEQ ID NO: 151
  Synthetic oligonucleotide

SEQ ID NO: 2862 - DNA, 35 bp, Artificial Sequence; identical to SEQ ID NO: 326
  Synthetic oligonucleotide

SEQ ID NO: 2863 - DNA, 35 bp, Artificial Sequence; identical to SEQ ID NO: 181
  Synthetic oligonucleotide

SEQ ID NO: 2864 - DNA, 38 bp, Artificial Sequence; identical to SEQ ID NO: 852
  Synthetic oligonucleotide

SEQ ID NO: 2865 - DNA, 36 bp, Artificial Sequence; identical to SEQ ID NO: 184
  Synthetic oligonucleotide

SEQ ID NO: 2866 - DNA, 36 bp, Artificial Sequence
  Synthetic oligonucleotide
tgggtgtcgtactggtaccaaggagtgcgaaatcta

SEQ ID NO: 2867 - DNA, 35 bp, Artificial Sequence; identical to SEQ ID NO: 272
  Synthetic oligonucleotide

SEQ ID NO: 2868 - DNA, 35 bp, Artificial Sequence
  Synthetic oligonucleotide
acgcgcataaaccaatcactaccgaccacttattc

SEQ ID NO: 2869 - DNA, 35 bp, Artificial Sequence
  Synthetic oligonucleotide
acgtcaggcataaattcttcaaactcttactatca

SEQ ID NO: 2870 - DNA, 36 bp, Artificial Sequence
  Synthetic oligonucleotide
catgcccggaccattattattcgcttaccattccca

SEQ ID NO: 2871 - DNA, 37 bp, Artificial Sequence
  Synthetic oligonucleotide
catgccgaccactgttccttttacctcttatacctga

SEQ ID NO: 2872 - DNA, 35 bp, Artificial Sequence
  Synthetic oligonucleotide
catgcgaacagacgaatgattcttacaaccgcaac

SEQ ID NO: 2873 - DNA, 35 bp, Artificial Sequence
  Synthetic oligonucleotide
cccgtccgcaggcatccacgtttatgccttttatc

SEQ ID NO: 2874 - DNA, 36 bp, Artificial Sequence
  Synthetic oligonucleotide
cacgcgaccctcattaacatcatctaacccaatcca

SEQ ID NO: 2875 - DNA, 35 bp, Artificial Sequence
  Synthetic oligonucleotide
catgcgccaattttactgtacatttctttttttat

SEQ ID NO: 2876 - DNA, 35 bp, Artificial Sequence
  Synthetic oligonucleotide
catgcgcgccgacctactcgcttaatctcacgttt

SEQ ID NO: 2877 - DNA, 35 bp, Artificial Sequence
  Synthetic oligonucleotide
catggcgaccctcaatctcacattttacctcttct

SEQ ID NO: 2878 - DNA, 35 bp, Artificial Sequence
  Synthetic oligonucleotide
gacggactgcgtatcgcatagtttatccttttttt

SEQ ID NO: 2879 - DNA, 35 bp, Artificial Sequence
  Synthetic oligonucleotide
gcccaccatatcgcaatcatattcctcgccttgtt

SEQ ID NO: 2880 - DNA, 35 bp, Artificial Sequence
  Synthetic oligonucleotide
gcgcatgtcaaccttacctctattggcccttattc

SEQ ID NO: 2881 - DNA, 35 bp, Artificial Sequence
  Synthetic oligonucleotide
gcatccagtccataactcaatctcacctgtaattc

SEQ ID NO: 2882 - DNA, 35 bp, Artificial Sequence
  Synthetic oligonucleotide
gccgcatacccctgtaatttcgtaacctacaccca

SEQ ID NO: 2883 - DNA, 34 bp, Artificial Sequence
  Synthetic oligonucleotide
gcgcaactccgactatcactgccttaccaatcac

SEQ ID NO: 2884 - DNA, 36 bp, Artificial Sequence
  Synthetic oligonucleotide
gcgacgcctctgacctacatataactttgatagtaa

SEQ ID NO: 2885 - DNA, 35 bp, Artificial Sequence
  Synthetic oligonucleotide
gcgacgcgtgaacacccttattctgtaatcttttt

SEQ ID NO: 2886 - DNA, 35 bp, Artificial Sequence
  Synthetic oligonucleotide
gtactgtcaacccgatctttgtttgtatttatttt

SEQ ID NO: 2887 - DNA, 38 bp, Artificial Sequence
  Synthetic oligonucleotide
gcgcggtactcattatccttatatcatcttacatttga

SEQ ID NO: 2888 - DNA, 37 bp, Artificial Sequence
  Synthetic oligonucleotide
tatgcgagcccatttttcacctttgctatttcttaga

SEQ ID NO: 2889 - DNA, 35 bp, Artificial Sequence
  Synthetic oligonucleotide
tcctccagcacattctaccacactaccacattcat

SEQ ID NO: 2890 - DNA, 35 bp, Artificial Sequence
  Synthetic oligonucleotide
tatgcggtgccacttctctattacttctattactt

SEQ ID NO: 2891 - DNA, 36 bp, Artificial Sequence
  Synthetic oligonucleotide
tcatgcagcctagtatctatcctaccatattattca

SEQ ID NO: 2892 - DNA, 35 bp, Artificial Sequence
  Synthetic oligonucleotide
tgacggacagtgcatgcgttatacttattctctat

SEQ ID NO: 2893 - DNA, 38 bp, Artificial Sequence
  Synthetic oligonucleotide
aagcctggccgtggtgctgcagtttattccgttagtga

SEQ ID NO: 2894 - DNA, 36 bp, Artificial Sequence; identical to SEQ ID NO: 2860
  Synthetic oligonucleotide

SEQ ID NO: 2895 - DNA, 36 bp, Artificial Sequence; identical to SEQ ID NO: 151
  Synthetic oligonucleotide

SEQ ID NO: 2896 - DNA, 36 bp, Artificial Sequence
  Synthetic oligonucleotide
gcattcgcgtactgtggacaacctatatccgggtaa

SEQ ID NO: 2897 - DNA, 36 bp, Artificial Sequence
  Synthetic oligonucleotide
gcaactatcgcgagcgccttcaagattagcgtgtca

SEQ ID NO: 2898 - DNA, 38 bp, Artificial Sequence; identical to SEQ ID NO: 169
  Synthetic oligonucleotide

SEQ ID NO: 2899 - DNA, 38 bp, Artificial Sequence
  Synthetic oligonucleotide
gtgcggggccacaggtgatagcaatgcatgccctatga

SEQ ID NO: 2900 - DNA, 37 bp, Artificial Sequence
  Synthetic oligonucleotide
tcaccccaagcagtcattgcctacaggagtctggtga

SEQ ID NO: 2901 - DNA, 37 bp, Artificial Sequence
  Synthetic oligonucleotide
tgcagttagtgcaatgaatatctcggacacgcggaga

SEQ ID NO: 2902 - DNA, 35 bp, Artificial Sequence
  Synthetic oligonucleotide
tccgcagacagccgggggtcaggactacggctacg

SEQ ID NO: 2903 - DNA, 37 bp, Artificial Sequence
  Synthetic oligonucleotide
ttacagctactctgcgctccaagtggacactttacga

SEQ ID NO: 2904 - DNA, 36 bp, Artificial Sequence
  Synthetic oligonucleotide
ttagcatcactgacttggatacatacagcatgtcga

SEQ ID NO: 2905 - DNA, 35 bp, Artificial Sequence
  Synthetic oligonucleotide
agcacgactgcaatccacatccgttcttattcctt

SEQ ID NO: 2906 - DNA, 37 bp, Artificial Sequence
  Synthetic oligonucleotide
aatgcgcacatctgtttttgtaccttagaatgtttga

SEQ ID NO: 2907 - DNA, 35 bp, Artificial Sequence; identical to SEQ ID NO: 2869
  Synthetic oligonucleotide

SEQ ID NO: 2908 - DNA, 36 bp, Artificial Sequence
  Synthetic oligonucleotide
catgcaccactcgcacattccaccacaatctataca

SEQ ID NO: 2909 - DNA, 35 bp, Artificial Sequence
  Synthetic oligonucleotide
ctgccactagccgcccatactatccacaccataat

SEQ ID NO: 2910 - DNA, 35 bp, Artificial Sequence
  Synthetic oligonucleotide
ccatgcgcggtcacacataccagtccttaccattt

SEQ ID NO: 2911 - DNA, 35 bp, Artificial Sequence
  Synthetic oligonucleotide
catgccgacacaccacttttttccgaccgacttcc

SEQ ID NO: 2912 - DNA, 35 bp, Artificial Sequence
  Synthetic oligonucleotide
catgccgcctttcgacttccatatcccaacacgac

SEQ ID NO: 2913 - DNA, 35 bp, Artificial Sequence; identical to SEQ ID NO: 194
  Synthetic oligonucleotide

SEQ ID NO: 2914 - DNA, 35 bp, Artificial Sequence; identical to SEQ ID NO: 195
  Synthetic oligonucleotide

SEQ ID NO: 2915 - DNA, 35 bp, Artificial Sequence
  Synthetic oligonucleotide
cttgccgatcccgctccctagttcccttgcccact

SEQ ID NO: 2916 - DNA, 36 bp, Artificial Sequence
  Synthetic oligonucleotide
cacgcatgtctgcgctcgtatcttttcaccctatga

SEQ ID NO: 2917 - DNA, 38 bp, Artificial Sequence
  Synthetic oligonucleotide
cactgcggtcaacacccaccaacctccgaccttactga

SEQ ID NO: 2918 - DNA, 38 bp, Artificial Sequence
  Synthetic oligonucleotide
catgcgtacgccactttcgcctactctaacatatctga

SEQ ID NO: 2919 - DNA, 35 bp, Artificial Sequence
  Synthetic oligonucleotide
cagtctgcgcgaccctttctgttccttcatcccca

SEQ ID NO: 2920 - DNA, 35 bp, Artificial Sequence
  Synthetic oligonucleotide
cattgcgccttctattttattttccttatatttgt

SEQ ID NO: 2921 - DNA, 38 bp, Artificial Sequence
  Synthetic oligonucleotide
cattgcggccattacccctctaccgttaccctttttga

SEQ ID NO: 2922 - DNA, 35 bp, Artificial Sequence
  Synthetic oligonucleotide
gcacacacctgcggagcaccactccaaattaccca

SEQ ID NO: 2923 - DNA, 35 bp, Artificial Sequence
  Synthetic oligonucleotide
gcacactacgtttaccctggcccttctaattgttt

SEQ ID NO: 2924 - DNA, 35 bp, Artificial Sequence
  Synthetic oligonucleotide
gcactgccattgatttcttcccacttcacactctt

SEQ ID NO: 2925 - DNA, 36 bp, Artificial Sequence
  Synthetic oligonucleotide
gcgaacactgatcttaactaacgcccgcccaattta

SEQ ID NO: 2926 - DNA, 36 bp, Artificial Sequence
  Synthetic oligonucleotide
gcacccccaatgaccgccatcaaaccatatattcca

SEQ ID NO: 2927 - DNA, 36 bp, Artificial Sequence
  Synthetic oligonucleotide
gcgcaaccatcactataacccatttacctgttttca

SEQ ID NO: 2928 - DNA, 38 bp, Artificial Sequence
  Synthetic oligonucleotide
gcgcaccacacttgagttctttaactttccctttatga

SEQ ID NO: 2929 - DNA, 35 bp, Artificial Sequence
  Synthetic oligonucleotide
gccgacgtacctgctgggtctctctattcattttt

SEQ ID NO: 2930 - DNA, 35 bp, Artificial Sequence
  Synthetic oligonucleotide
tacgccgtccaccatcctcttctatatacctaacc

SEQ ID NO: 2931 - DNA, 35 bp, Artificial Sequence
  Synthetic oligonucleotide
tactacgaaccatcccactctttgcacctgttttc

SEQ ID NO: 2932 - DNA, 34 bp, Artificial Sequence
  Synthetic oligonucleotide
tcatgcgcggtacacatttcttaatcacttttct

SEQ ID NO: 2933 - DNA, 35 bp, Artificial Sequence
  Synthetic oligonucleotide
tgcgggcattggtgcaatcttaacttattctttat

SEQ ID NO: 2934 - DNA, 35 bp, Artificial Sequence
  Synthetic oligonucleotide
tggtagtgctgcatcaccgatcatccttttacatt

SEQ ID NO: 2935 - DNA, 37 bp, Artificial Sequence
  Synthetic oligonucleotide
tccgcgactgttcatcccccatcccaacataacccga

SEQ ID NO: 2936 - DNA, 38 bp, Artificial Sequence
  Synthetic oligonucleotide
tgtgaacgtcactgcaccctaaactaatattcccttga

SEQ ID NO: 2937 - DNA, 36 bp, Artificial Sequence
  Synthetic oligonucleotide
ttgacaactgccactaccaactgaacccgctactta

SEQ ID NO: 2938 - DNA, 38 bp, Artificial Sequence
  Synthetic oligonucleotide
ttgtcaagcgctatccaccatttctcttttatctatga

SEQ ID NO: 2939 - DNA, 35 bp, Artificial Sequence
  Synthetic oligonucleotide
caatgcgacgaggcttctatgtcatgaactaagct

SEQ ID NO: 2940 - DNA, 37 bp, Artificial Sequence
  Synthetic oligonucleotide
ccgaacggtcgcaaagtggtgtagcctctaatccgga

SEQ ID NO: 2941 - DNA, 35 bp, Artificial Sequence; identical to SEQ ID NO: 2877
  Synthetic oligonucleotide

SEQ ID NO: 2942 - DNA, 38 bp, Artificial Sequence
  Synthetic oligonucleotide
accggaatgtacatgccctggtttttgttattatttga

SEQ ID NO: 2943 - DNA, 35 bp, Artificial Sequence
  Synthetic oligonucleotide
accatgcgcccaccactattttttccacttcctta

SEQ ID NO: 2944 - DNA, 37 bp, Artificial Sequence
  Synthetic oligonucleotide
acggagtaccctgcccactatataacttaaaccttga

SEQ ID NO: 2945 - DNA, 35 bp, Artificial Sequence
  Synthetic oligonucleotide
acgggcgtgtcgcactgtctgtcactggcttattc

SEQ ID NO: 2946 - DNA, 35 bp, Artificial Sequence
  Synthetic oligonucleotide
agacggtgggtgggtgggtggtgctgcagtctacc

SEQ ID NO: 2947 - DNA, 35 bp, Artificial Sequence
  Synthetic oligonucleotide
catgccgcaccccaacacgtaccatttcattattt

SEQ ID NO: 2948 - DNA, 36 bp, Artificial Sequence
  Synthetic oligonucleotide
catgcgggcatccttagcttaacctcaattccatta

SEQ ID NO: 2949 - DNA, 35 bp, Artificial Sequence
  Synthetic oligonucleotide
catggccattctaccctccattccattccttgcct

SEQ ID NO: 2950 - DNA, 35 bp, Artificial Sequence
  Synthetic oligonucleotide
cgttcggtacgcagtcatttcactctatcttgttc

SEQ ID NO: 2951 - DNA, 37 bp, Artificial Sequence
  Synthetic oligonucleotide
aacccacgagttgttggtccacgcctcgttatcacga

SEQ ID NO: 2952 - DNA, 36 bp, Artificial Sequence
  Synthetic oligonucleotide
aacccatgcctgccccatgtgcattcaggcagagca

SEQ ID NO: 2953 - DNA, 36 bp, Artificial Sequence
  Synthetic oligonucleotide
accgccacagtcatcaacccacctggccgacgacga

SEQ ID NO: 2954 - DNA, 36 bp, Artificial Sequence
  Synthetic oligonucleotide
gacaacgcaaccgcaggctcatggagccaatatgta

SEQ ID NO: 2955 - DNA, 37 bp, Artificial Sequence
  Synthetic oligonucleotide
gacaacacgtcgcatgatcttaaaagaggacctagga

SEQ ID NO: 2956 - DNA, 38 bp, Artificial Sequence
  Synthetic oligonucleotide
gagtggtcgccactcacaacgatgcggtatccccttga

SEQ ID NO: 2957 - DNA, 37 bp, Artificial Sequence
  Synthetic oligonucleotide
gcgtggtggtccgccggtggtgagtcgatgaactgga

SEQ ID NO: 2958 - DNA, 36 bp, Artificial Sequence
  Synthetic oligonucleotide
gtgatcgatagcgagtgttgagctgtcgagagtgga

SEQ ID NO: 2959 - DNA, 36 bp, Artificial Sequence
  Synthetic oligonucleotide
tcacacaccgcgtggctcggacgacaagtagtccta

SEQ ID NO: 2960 - DNA, 35 bp, Artificial Sequence
  Synthetic oligonucleotide
tgaacctgcacagctgttaagaggtggcttacgta

SEQ ID NO: 2961 - DNA, 35 bp, Artificial Sequence
  Synthetic oligonucleotide
actgaccacagctacgtaagcaataaccgatcgtt

SEQ ID NO: 2962 - DNA, 35 bp, Artificial Sequence
  Synthetic oligonucleotide
aagagtacgggcatgagtaataagggagtagccgt

SEQ ID NO: 2963 - DNA, 35 bp, Artificial Sequence
  Synthetic oligonucleotide
agatcgcggtcaatcggtgggtagttaggatcggg

SEQ ID NO: 2964 - DNA, 35 bp, Artificial Sequence
  Synthetic oligonucleotide
gaacacacgtcgatcgccactgagagcagatgtca

SEQ ID NO: 2965 - DNA, 35 bp, Artificial Sequence
  Synthetic oligonucleotide
atcggaggccgtatcaccatatcccaccaccactt

SEQ ID NO: 2966 - DNA, 34 bp, Artificial Sequence
  Synthetic oligonucleotide
cttattttagcaagatcttttatctaaatacaat

SEQ ID NO: 2967 - DNA, 36 bp, Artificial Sequence
  Synthetic oligonucleotide
gacaaacgtagtgctgaacatggcgttctggtccaa

SEQ ID NO: 2968 - DNA, 35 bp, Artificial Sequence
  Synthetic oligonucleotide
ataccgggacaggcgacagaagggtgaaccaatgt

SEQ ID NO: 2969 - DNA, 37 bp, Artificial Sequence
  Synthetic oligonucleotide
gagtggacgtggacgcgaaacgggtcaggcataacga

SEQ ID NO: 2970 - DNA, 36 bp, Artificial Sequence
  Synthetic oligonucleotide
taccacgtggcgcctgacgacttacgcaactgggga

SEQ ID NO: 2971 - DNA, 36 bp, Artificial Sequence
  Synthetic oligonucleotide
tacagccgacatgaacatcccttaatcccaccctaa

SEQ ID NO: 2972 - DNA, 37 bp, Artificial Sequence
  Synthetic oligonucleotide
tgataccgcgcaacgagacttaccacgtcaggatgga

SEQ ID NO: 2973 - DNA, 36 bp, Artificial Sequence
  Synthetic oligonucleotide
atggtgggagcaccgacgtaggaggcctatggcgta

SEQ ID NO: 2974 - DNA, 37 bp, Artificial Sequence; identical to SEQ ID NO: 2955
  Synthetic oligonucleotide

SEQ ID NO: 2975 - DNA, 38 bp, Artificial Sequence
  Synthetic oligonucleotide
gtgaacgtcgctagaaacgatggtgtaaatagtcttga

SEQ ID NO: 2976 - DNA, 36 bp, Artificial Sequence; identical to SEQ ID NO: 2958
  Synthetic oligonucleotide

SEQ ID NO: 2977 - DNA, 37 bp, Artificial Sequence
  Synthetic oligonucleotide
aacacgcaacacacaactctcggcaaatccagcgcga

SEQ ID NO: 2978 - DNA, 37 bp, Artificial Sequence
  Synthetic oligonucleotide
acgacgcaccctgccactatcgtagatactccgacta

SEQ ID NO: 2979 - DNA, 36 bp, Artificial Sequence
  Synthetic oligonucleotide
gaccaatggaccggggactactctgagaaagcgcga

SEQ ID NO: 2980 - DNA, 36 bp, Artificial Sequence
  Synthetic oligonucleotide
agtggaacgcaccgaagttacctacctgagatggga

SEQ ID NO: 2981 - DNA, 37 bp, Artificial Sequence
  Synthetic oligonucleotide
gacgacggggatcctgacaattcctgactaagcgcga

SEQ ID NO: 2982 - DNA, 35 bp, Artificial Sequence
  Synthetic oligonucleotide
gacccgcccagtaagcacacacacagcccaaattt

SEQ ID NO: 2983 - DNA, 37 bp, Artificial Sequence
  Synthetic oligonucleotide
gagcggactcgaatagaactccgcaacaccagcgcga

SEQ ID NO: 2984 - DNA, 37 bp, Artificial Sequence
  Synthetic oligonucleotide
gagacgaggccgggatcatgctagggatcggacagga

SEQ ID NO: 2985 - DNA, 36 bp, Artificial Sequence
  Synthetic oligonucleotide
taccgacaccctcgtgttcccaaacaaggagacgga

SEQ ID NO: 2986 - DNA, 37 bp, Artificial Sequence
  Synthetic oligonucleotide
ggatacgcaccttaaggagggacgaataaaagcgcga

SEQ ID NO: 2987 - DNA, 36 bp, Artificial Sequence
  Synthetic oligonucleotide
tagcacagtggtgcttacggaacatcaccagcgcga

SEQ ID NO: 2988 - DNA, 37 bp, Artificial Sequence
  Synthetic oligonucleotide
tagtcggtcggcctgccgatgcgtcaaggtagcgcga

SEQ ID NO: 2989 - DNA, 37 bp, Artificial Sequence
  Synthetic oligonucleotide
taggaatcaccggctcgggcgaggccgggaagcgcga

SEQ ID NO: 2990 - DNA, 37 bp, Artificial Sequence
  Synthetic oligonucleotide
tgagccgcaaccggcaaacaaggcttcaacagcgcga

SEQ ID NO: 2991 - DNA, 36 bp, Artificial Sequence
  Synthetic oligonucleotide
aacaccacaccgccgctgatccggatggaacctcga

SEQ ID NO: 2992 - DNA, 35 bp, Artificial Sequence; identical to SEQ ID NO: 2962
  Synthetic oligonucleotide

SEQ ID NO: 2993 - DNA, 36 bp, Artificial Sequence
  Synthetic oligonucleotide
acacgtgccccaccaatatgcgataagactttgtta

SEQ ID NO: 2994 - DNA, 36 bp, Artificial Sequence
  Synthetic oligonucleotide
gacaccgaagacgaggctaaagagagaagtgccata

SEQ ID NO: 2995 - DNA, 35 bp, Artificial Sequence
  Synthetic oligonucleotide
atcgccgcacacctgccactcactcttccatcgct

SEQ ID NO: 2996 - DNA, 34 bp, Artificial Sequence; identical to SEQ ID NO: 2966
  Synthetic oligonucleotide

SEQ ID NO: 2997 - DNA, 36 bp, Artificial Sequence
  Synthetic oligonucleotide
gactaacgccgcttatcctcaacgcctaaccttgtt

SEQ ID NO: 2998 - DNA, 37 bp, Artificial Sequence
  Synthetic oligonucleotide
gagtggtcgcctgcaggtgcattccatccagctccga

SEQ ID NO: 2999 - DNA, 35 bp, Artificial Sequence
  Synthetic oligonucleotide
gtggaggctgcaatacggtgcaagagagcttaggg

SEQ ID NO: 3000 - DNA, 37 bp, Artificial Sequence
  Synthetic oligonucleotide
gtcaccgcatgcgggtcaagccctcaactttacttga

SEQ ID NO: 3001 - DNA, 37 bp, Artificial Sequence
  Synthetic oligonucleotide
taagtcgcgccccagtcagtgattgatacagatagga

SEQ ID NO: 3002 - DNA, 36 bp, Artificial Sequence
  Synthetic oligonucleotide
tcaacatgcgtgcaagtggcaccgttctcgtttcga

SEQ ID NO: 3003 - DNA, 34 bp, Artificial Sequence
  Synthetic oligonucleotide
tcttatttagcaagatcttttatctaaatacaat

SEQ ID NO: 3004 - DNA, 37 bp, Artificial Sequence; identical to SEQ ID NO: 2977
  Synthetic oligonucleotide

SEQ ID NO: 3005 - DNA, 37 bp, Artificial Sequence; identical to SEQ ID NO: 2978
  Synthetic oligonucleotide

SEQ ID NO: 3006 - DNA, 36 bp, Artificial Sequence; identical to SEQ ID NO: 2979
  Synthetic oligonucleotide

SEQ ID NO: 3007 - DNA, 37 bp, Artificial Sequence; identical to SEQ ID NO: 2981
  Synthetic oligonucleotide

SEQ ID NO: 3008 - DNA, 37 bp, Artificial Sequence; identical to SEQ ID NO: 2983
  Synthetic oligonucleotide

SEQ ID NO: 3009 - DNA, 37 bp, Artificial Sequence; identical to SEQ ID NO: 2984
  Synthetic oligonucleotide

SEQ ID NO: 3010 - DNA, 36 bp, Artificial Sequence
  Synthetic oligonucleotide
tacgcgggtggtcgaccccactagtagtcatccata

SEQ ID NO: 3011 - DNA, 36 bp, Artificial Sequence; identical to SEQ ID NO: 2985
  Synthetic oligonucleotide

SEQ ID NO: 3012 - DNA, 37 bp, Artificial Sequence; identical to SEQ ID NO: 2986
  Synthetic oligonucleotide

SEQ ID NO: 3013 - DNA, 36 bp, Artificial Sequence; identical to SEQ ID NO: 2987
  Synthetic oligonucleotide

SEQ ID NO: 3014 - DNA, 37 bp, Artificial Sequence; identical to SEQ ID NO: 2988
  Synthetic oligonucleotide

SEQ ID NO: 3015 - DNA, 37 bp, Artificial Sequence; identical to SEQ ID NO: 2989
  Synthetic oligonucleotide

SEQ ID NO: 3016 - DNA, 38 bp, Artificial Sequence
  Synthetic oligonucleotide
tccgaacgggacgtacaccaagccgagctctatcctga

SEQ ID NO: 3017 - DNA, 37 bp, Artificial Sequence; identical to SEQ ID NO: 2990
  Synthetic oligonucleotide

SEQ ID NO: 3018 - DNA, 36 bp, Artificial Sequence
  Synthetic oligonucleotide
accatcgggtcacgtaaaagcggttctaatttctaa

SEQ ID NO: 3019 - DNA, 35 bp, Artificial Sequence; identical to SEQ ID NO: 721
  Synthetic oligonucleotide

SEQ ID NO: 3020 - DNA, 36 bp, Artificial Sequence
  Synthetic oligonucleotide
gaacaggcgttccctactgatttatctgtccccata

SEQ ID NO: 3021 - DNA, 36 bp, Artificial Sequence
  Synthetic oligonucleotide
gaccatgcgagcggcaaagcacggaaaatgtttgaa

SEQ ID NO: 3022 - DNA, 38 bp, Artificial Sequence
  Synthetic oligonucleotide
gagtcatgtccgcctttaacccgacttaagaactttga

SEQ ID NO: 3023 - DNA, 38 bp, Artificial Sequence
  Synthetic oligonucleotide
gcaagatgaagttggtactttcctctctattcttttga

SEQ ID NO: 3024 - DNA, 37 bp, Artificial Sequence
  Synthetic oligonucleotide
gccacaccgcccgtacatacttcctcaccaacattga

SEQ ID NO: 3025 - DNA, 35 bp, Artificial Sequence
  Synthetic oligonucleotide
gcgcgcccaccagtatcttttggtctagataggca

SEQ ID NO: 3026 - DNA, 35 bp, Artificial Sequence
  Synthetic oligonucleotide
gggcccacgccaccgtttgtccacaggaaggatac

SEQ ID NO: 3027 - DNA, 37 bp, Artificial Sequence
  Synthetic oligonucleotide
gtgcggtcatggaattcttttaagcatgataatacga

SEQ ID NO: 3028 - DNA, 35 bp, Artificial Sequence
  Synthetic oligonucleotide
ttgcaaagcgcaccgtccgagccggtggcaccgaa

SEQ ID NO: 3029 - DNA, 37 bp, Artificial Sequence
  Synthetic oligonucleotide
ttcacgccacattcacgggaactgagagtgacgacga

SEQ ID NO: 3030 - DNA, 37 bp, Artificial Sequence
  Synthetic oligonucleotide
tttgcggtcattaacttgcgtgtaggacaccggtgga

SEQ ID NO: 3031 - DNA, 35 bp, Artificial Sequence
  Synthetic oligonucleotide
acgcagtgccgccgaatcctgatcccctaactttc

SEQ ID NO: 3032 - DNA, 35 bp, Artificial Sequence
  Synthetic oligonucleotide
aatgcgtccgacctaactgttgcgattcttctttt

SEQ ID NO: 3033 - DNA, 38 bp, Artificial Sequence
  Synthetic oligonucleotide
acacacaagtccatgcgggcctcacttttcgcctatga

SEQ ID NO: 3034 - DNA, 36 bp, Artificial Sequence
  Synthetic oligonucleotide
agtcccaactgcagggtttatacctctggttctctc

SEQ ID NO: 3035 - DNA, 36 bp, Artificial Sequence
  Synthetic oligonucleotide
gcacacgcccacattgtcctactagctattttatta

SEQ ID NO: 3036 - DNA, 38 bp, Artificial Sequence
  Synthetic oligonucleotide
gccgcccctgagtagttttcgtttttcttgtcctctga

SEQ ID NO: 3037 - DNA, 35 bp, Artificial Sequence
  Synthetic oligonucleotide
gcgatcgatatgttgcctatcctcttacgacatct

SEQ ID NO: 3038 - DNA, 35 bp, Artificial Sequence
  Synthetic oligonucleotide
gcgttgtccgtgtccatccatcttgtcatttgttt

SEQ ID NO: 3039 - DNA, 35 bp, Artificial Sequence
  Synthetic oligonucleotide
taacgtacaaccgggcgcacaggccattcttctac

SEQ ID NO: 3040 - DNA, 35 bp, Artificial Sequence
  Synthetic oligonucleotide
gttcggggtgcatgtcgtgaagccgctaacctctt

SEQ ID NO: 3041 - DNA, 38 bp, Artificial Sequence
  Synthetic oligonucleotide
tgctcagtcaagcgagtaccactacgcctattccgtga

SEQ ID NO: 3042 - DNA, 38 bp, Artificial Sequence
  Synthetic oligonucleotide
tgctaaacgtactggggcttcctcagatctttgcttga

SEQ ID NO: 3043 - DNA, 36 bp, Artificial Sequence
  Synthetic oligonucleotide
tgtacccccgccgtaatcatctatcttgtccccgaa

SEQ ID NO: 3044 - DNA, 35 bp, Artificial Sequence
  Synthetic oligonucleotide
accactgaactcatggtactaatcacacaccaatt

SEQ ID NO: 3045 - DNA, 37 bp, Artificial Sequence
  Synthetic oligonucleotide
actgtacagtagtccacgaacatatcgctttctatga

SEQ ID NO: 3046 - DNA, 38 bp, Artificial Sequence
  Synthetic oligonucleotide
accgcgcgctgcagtatatcccacttcgttctatatga

SEQ ID NO: 3047 - DNA, 35 bp, Artificial Sequence
  Synthetic oligonucleotide
agtggatcactgggcggagtgcgttaggaagacgg

SEQ ID NO: 3048 - DNA, 35 bp, Artificial Sequence
  Synthetic oligonucleotide
gattacgccttaagtggtactcagttatgaggaga

SEQ ID NO: 3049 - DNA, 37 bp, Artificial Sequence
  Synthetic oligonucleotide
gcgtaggtcatgcgacgtataaccttcccacaaatga

SEQ ID NO: 3050 - DNA, 37 bp, Artificial Sequence
  Synthetic oligonucleotide
tacaccaaaaagatcggtgattaccatgcaacaagga

SEQ ID NO: 3051 - DNA, 35 bp, Artificial Sequence
  Synthetic oligonucleotide
taccagacgtaccgcacacctttcatctgcctaac

SEQ ID NO: 3052 - DNA, 35 bp, Artificial Sequence
  Synthetic oligonucleotide
tttgagactgcgggctgtgcgttgctttgatatcc

SEQ ID NO: 3053 - DNA, 35 bp, Artificial Sequence
  Synthetic oligonucleotide
actgactgcatacatccgcatattaaacccgtatt

SEQ ID NO: 3054 - DNA, 36 bp, Artificial Sequence
  Synthetic oligonucleotide
acatctccaggattccccttcagccatggccctaca

SEQ ID NO: 3055 - DNA, 38 bp, Artificial Sequence
  Synthetic oligonucleotide
acgctcagctggcatgtaccccccctctctacacttga

SEQ ID NO: 3056 - DNA, 36 bp, Artificial Sequence
  Synthetic oligonucleotide
actcgcgtgtccaacacggactgcagtagcaatcca

SEQ ID NO: 3057 - DNA, 37 bp, Artificial Sequence
  Synthetic oligonucleotide
gcaggtggtgcaggttattcatgcgaaagggtactga

SEQ ID NO: 3058 - DNA, 36 bp, Artificial Sequence
  Synthetic oligonucleotide
gcggtggaaacgtaatcggacactgcgcatgcgaca

SEQ ID NO: 3059 - DNA, 36 bp, Artificial Sequence
  Synthetic oligonucleotide
tgaacctgcgatggtccgtgcgaacccgatctcaca

SEQ ID NO: 3060 - DNA, 35 bp, Artificial Sequence
  Synthetic oligonucleotide
tcacgtccccaacaacccggagtaattccctgcca

SEQ ID NO: 3061 - DNA, 35 bp, Artificial Sequence
  Synthetic oligonucleotide
tgggtacacatccggcatgccaataacgcttaagt

SEQ ID NO: 3062 - DNA, 35 bp, Artificial Sequence
  Synthetic oligonucleotide
acgcctgtacgatgtcctcggtctcattttatttc

SEQ ID NO: 3063 - DNA, 35 bp, Artificial Sequence
  Synthetic oligonucleotide
aaacgtcaagggaaagcgtagtctcctcgaccctt

SEQ ID NO: 3064 - DNA, 36 bp, Artificial Sequence
  Synthetic oligonucleotide
actgggaagtacgctgtcaggcatttgctaactaaa

SEQ ID NO: 3065 - DNA, 35 bp, Artificial Sequence
  Synthetic oligonucleotide
aatcattgcaggtatatgcgagcgaactacgattc

SEQ ID NO: 3066 - DNA, 35 bp, Artificial Sequence
  Synthetic oligonucleotide
atacgttccggccaactgaaacggagttcgggtct

SEQ ID NO: 3067 - DNA, 36 bp, Artificial Sequence
  Synthetic oligonucleotide
atgcatagctgcccttcttatccgtttccaactaca

SEQ ID NO: 3068 - DNA, 38 bp, Artificial Sequence
  Synthetic oligonucleotide
atgcgaaactgtaagcacccttccaccttgtaccatga

SEQ ID NO: 3069 - DNA, 38 bp, Artificial Sequence
  Synthetic oligonucleotide
gacgccgaaacactaagcttttaacacttacgatatga

SEQ ID NO: 3070 - DNA, 35 bp, Artificial Sequence
  Synthetic oligonucleotide
attatcccagcgatcccgagtcccggcatttactg

SEQ ID NO: 3071 - DNA, 36 bp, Artificial Sequence
  Synthetic oligonucleotide
catgcgcatatcgctccgttcgttcctcaatttcca

SEQ ID NO: 3072 - DNA, 38 bp, Artificial Sequence
  Synthetic oligonucleotide
gcccgaacccgaaaaccgatcgcctgaatcccaattga

SEQ ID NO: 3073 - DNA, 35 bp, Artificial Sequence
  Synthetic oligonucleotide
gcaggctcgcgtagcttcaaactagcagaccacgt

SEQ ID NO: 3074 - DNA, 38 bp, Artificial Sequence
  Synthetic oligonucleotide
gcacgggacgcaagctagactacacaccgactttttga

SEQ ID NO: 3075 - DNA, 38 bp, Artificial Sequence
  Synthetic oligonucleotide
gctggcactgcgaatatcgatctacactatcccactga

SEQ ID NO: 3076 - DNA, 36 bp, Artificial Sequence
  Synthetic oligonucleotide
gctagcacacaggatccctctttattagcacttcaa

SEQ ID NO: 3077 - DNA, 35 bp, Artificial Sequence
  Synthetic oligonucleotide
tatgcgacccgttaaacccgtactcttcctaaact

SEQ ID NO: 3078 - DNA, 38 bp, Artificial Sequence
  Synthetic oligonucleotide
tagtcatgcgcgcatctcaaaatttacttctcaaatga

SEQ ID NO: 3079 - DNA, 38 bp, Artificial Sequence
  Synthetic oligonucleotide
tctacactccgctccttgacctaatttaaagaccttga

SEQ ID NO: 3080 - DNA, 35 bp, Artificial Sequence
  Synthetic oligonucleotide
tcgcggaaacctgcccctgcatcgtagccatccac

SEQ ID NO: 3081 - DNA, 36 bp, Artificial Sequence
  Synthetic oligonucleotide
ttcaccaccacccctttggacccttttaccgagaga

SEQ ID NO: 3082 - DNA, 36 bp, Artificial Sequence
  Synthetic oligonucleotide
ttgcagacctcatttacgcacttgggacttctgcca

SEQ ID NO: 3083 - DNA, 37 bp, Artificial Sequence
  Synthetic oligonucleotide
ttggcacctccactgcttgttctcgattcatgtgcga

SEQ ID NO: 3084 - DNA, 35 bp, Artificial Sequence
  Synthetic oligonucleotide
actgcggtcatcgagttactggctattgcctgacc

SEQ ID NO: 3085 - DNA, 36 bp, Artificial Sequence
  Synthetic oligonucleotide
cccgcggtaatagtgcgggcggacgcggtcatgaca

SEQ ID NO: 3086 - DNA, 36 bp, Artificial Sequence
  Synthetic oligonucleotide
gaacgtagactgactacggtccacacgcccattgta

SEQ ID NO: 3087 - DNA, 35 bp, Artificial Sequence
  Synthetic oligonucleotide
ccaacgacagatatggacgtgctgcgggggcaatc

SEQ ID NO: 3088 - DNA, 35 bp, Artificial Sequence
  Synthetic oligonucleotide
atgcgatgtcacgtgacgtgagtaaccgcccaccc

SEQ ID NO: 3089 - DNA, 35 bp, Artificial Sequence
  Synthetic oligonucleotide
gcccacccttgccagcatgtatgcttgcatgtaac

SEQ ID NO: 3090 - DNA, 35 bp, Artificial Sequence
  Synthetic oligonucleotide
gccggtcatgcggtttgcacaccactccattctac

SEQ ID NO: 3091 - DNA, 36 bp, Artificial Sequence
  Synthetic oligonucleotide
gccaggcccattccttgcgggaggttaacaccagca

SEQ ID NO: 3092 - DNA, 36 bp, Artificial Sequence; identical to SEQ ID NO: 3058
  Synthetic oligonucleotide

SEQ ID NO: 3093 - DNA, 37 bp, Artificial Sequence
  Synthetic oligonucleotide
gtttcaccccggctgggctagttctgttaatgcgaga

SEQ ID NO: 3094 - DNA, 36 bp, Artificial Sequence
  Synthetic oligonucleotide
tgtaccgcggttgcgactatttccttactgcccata

SEQ ID NO: 3095 - DNA, 35 bp, Artificial Sequence
  Synthetic oligonucleotide
ttcgcgacgataactagttgcatgtctgaattcac

SEQ ID NO: 3096 - DNA, 37 bp, Artificial Sequence
  Synthetic oligonucleotide
tgtcactgcacgatgagactttcggcgaatatactga

SEQ ID NO: 3097 - DNA, 36 bp, Artificial Sequence
  Synthetic oligonucleotide
aatgcattgcgttatttcaattgaggcgtcctaaaa

SEQ ID NO: 3098 - DNA, 38 bp, Artificial Sequence
  Synthetic oligonucleotide
gcactgccaactttcttctggggactatttagctttga

SEQ ID NO: 3099 - DNA, 36 bp, Artificial Sequence
  Synthetic oligonucleotide
ggtaccaaaagtactgccatgagagccacttcccaa

SEQ ID NO: 3100 - DNA, 35 bp, Artificial Sequence
  Synthetic oligonucleotide
catacgcacggtcctctactataattgtccaccaa

SEQ ID NO: 3101 - DNA, 35 bp, Artificial Sequence
  Synthetic oligonucleotide
atgctgcggtaatggagccggttcttaaactgcct

SEQ ID NO: 3102 - DNA, 36 bp, Artificial Sequence
  Synthetic oligonucleotide
agttactgacaggcgcgtctttcgcaacactttata

SEQ ID NO: 3103 - DNA, 35 bp, Artificial Sequence
  Synthetic oligonucleotide
gcacccgagcctaatagtcctctattccccttcca

SEQ ID NO: 3104 - DNA, 36 bp, Artificial Sequence
  Synthetic oligonucleotide
gcgagcagtccatggcccatcctcgacttaacctca

SEQ ID NO: 3105 - DNA, 36 bp, Artificial Sequence
  Synthetic oligonucleotide
ggtagcaggcataccctacggaacagttctgtggca

SEQ ID NO: 3106 - DNA, 36 bp, Artificial Sequence
  Synthetic oligonucleotide
taggcacgtgcatcaggcgttctttgcccctgttta

SEQ ID NO: 3107 - DNA, 35 bp, Artificial Sequence
  Synthetic oligonucleotide
tgtgcagtcagtgaacggtgacctagttatgattt

SEQ ID NO: 3108 - DNA, 38 bp, Artificial Sequence
  Synthetic oligonucleotide
agcccgttgctacgttgcagtaggtgtaacttcactga

SEQ ID NO: 3109 - DNA, 38 bp, Artificial Sequence
  Synthetic oligonucleotide
actaactgcaagcgcccttggcccgatttgacctttga

SEQ ID NO: 3110 - DNA, 35 bp, Artificial Sequence
  Synthetic oligonucleotide
actaccgcaaactgcactgtttaaaactccttgaa

SEQ ID NO: 3111 - DNA, 35 bp, Artificial Sequence
  Synthetic oligonucleotide
acgactatcgtacatgtgcgtagtttagattccaa

SEQ ID NO: 3112 - DNA, 37 bp, Artificial Sequence
  Synthetic oligonucleotide
agttgaccacggagtgtactgcaatggagtgtaccga

SEQ ID NO: 3113 - DNA, 36 bp, Artificial Sequence
  Synthetic oligonucleotide
gaacgagcccggatgttaggatcctcgatttgcgta

SEQ ID NO: 3114 - DNA, 35 bp, Artificial Sequence
  Synthetic oligonucleotide
agtgctgccactaagctagaaaagttttcatgccc

SEQ ID NO: 3115 - DNA, 36 bp, Artificial Sequence
  Synthetic oligonucleotide
atcgtaacggactgctatttgtacggatccctataa

SEQ ID NO: 3116 - DNA, 38 bp, Artificial Sequence
  Synthetic oligonucleotide
gcagtctagcgcccgcttgtaccacatcctcgctttga

SEQ ID NO: 3117 - DNA, 35 bp, Artificial Sequence
  Synthetic oligonucleotide
tgtactgagtgcacaacacgtgatgatgatatctt

SEQ ID NO: 3118 - DNA, 36 bp, Artificial Sequence
  Synthetic oligonucleotide
agcggtcaccgcctatggttattcatttttctctta

SEQ ID NO: 3119 - DNA, 35 bp, Artificial Sequence
  Synthetic oligonucleotide
actcagcgatgccctaacttggacgttcggctact

SEQ ID NO: 3120 - DNA, 35 bp, Artificial Sequence
  Synthetic oligonucleotide
cacaccgacgaaactgtcctcgcctactacctatc

SEQ ID NO: 3121 - DNA, 35 bp, Artificial Sequence
  Synthetic oligonucleotide
agtgaggcgtcacggctattactccgtgctaattt

SEQ ID NO: 3122 - DNA, 35 bp, Artificial Sequence; identical to SEQ ID NO: 3100
  Synthetic oligonucleotide

SEQ ID NO: 3123 - DNA, 35 bp, Artificial Sequence
  Synthetic oligonucleotide
gaaacggccatgaaccttttaatctttccaccttt

SEQ ID NO: 3124 - DNA, 36 bp, Artificial Sequence
  Synthetic oligonucleotide
gcgagaggatcaccgtgaggcttcccaactatttta

SEQ ID NO: 3125 - DNA, 35 bp, Artificial Sequence
  Synthetic oligonucleotide
gcgaggcgccctccaacccaacccattcaatggta

SEQ ID NO: 3126 - DNA, 35 bp, Artificial Sequence
  Synthetic oligonucleotide
gcgcagtccgtccacatttggtctactgctttcct

SEQ ID NO: 3127 - DNA, 35 bp, Artificial Sequence
  Synthetic oligonucleotide
gtgcgcctacatatatctcggttacaacctttttc

SEQ ID NO: 3128 - DNA, 35 bp, Artificial Sequence
  Synthetic oligonucleotide
tgcatcccaccactatgatatacctaatgccctct

SEQ ID NO: 3129 - DNA, 36 bp, Artificial Sequence
  Synthetic oligonucleotide
tgcaggccgcatcacctcttgtgccggttcatcaaa

SEQ ID NO: 3130 - DNA, 38 bp, Artificial Sequence
  Synthetic oligonucleotide
tgcgaggctagcttgttgccactatttggtccttatga

SEQ ID NO: 3131 - DNA, 38 bp, Artificial Sequence; identical to SEQ ID NO: 3108
  Synthetic oligonucleotide

SEQ ID NO: 3132 - DNA, 35 bp, Artificial Sequence
  Synthetic oligonucleotide
agggcaacgaacgcaggaatccctcattcctacgg

SEQ ID NO: 3133 - DNA, 35 bp, Artificial Sequence; identical to SEQ ID NO: 3114
  Synthetic oligonucleotide

SEQ ID NO: 3134 - DNA, 35 bp, Artificial Sequence
  Synthetic oligonucleotide
atcctcgttacgtgcacggacttctcatgcgaact

SEQ ID NO: 3135 - DNA, 36 bp, Artificial Sequence
  Synthetic oligonucleotide
gcccaggtttgacgactgccgtgcgctcggtcttaa

SEQ ID NO: 3136 - DNA, 37 bp, Artificial Sequence
  Synthetic oligonucleotide
ggtcatggcgcaacttcatcttttcacacctgattga

SEQ ID NO: 3137 - DNA, 36 bp, Artificial Sequence; identical to SEQ ID NO: 3105
  Synthetic oligonucleotide

SEQ ID NO: 3138 - DNA, 35 bp, Artificial Sequence
  Synthetic oligonucleotide
tcccgcaattacgcagaccgactacgattccaaaa

SEQ ID NO: 3139 - DNA, 38 bp, Artificial Sequence
  Synthetic oligonucleotide
tgtacgtaggtaagcgatacacactgcacccctactga

SEQ ID NO: 3140 - DNA, 35 bp, Artificial Sequence
  Synthetic oligonucleotide
tgacctctgcagtggccagcccattctttagcttc

SEQ ID NO: 3141 - DNA, 35 bp, Artificial Sequence
  Synthetic oligonucleotide
ttactgcaggtgcgatcgcgttctccaacatctct

SEQ ID NO: 3142 - DNA, 37 bp, Artificial Sequence
  Synthetic oligonucleotide
accacgttggttattgccctgctttgaagtcttacga

SEQ ID NO: 3143 - DNA, 36 bp, Artificial Sequence
  Synthetic oligonucleotide
aacacactgcgcctttactttaattttcgattatta

SEQ ID NO: 3144 - DNA, 35 bp, Artificial Sequence
  Synthetic oligonucleotide
agcaccgacgtgataggactgtaatgccctcctct

SEQ ID NO: 3145 - DNA, 35 bp, Artificial Sequence
  Synthetic oligonucleotide
atgcgcgagtcataaggcgtttcttttcactggct

SEQ ID NO: 3146 - DNA, 35 bp, Artificial Sequence
  Synthetic oligonucleotide
atgcgacatgcgttacaataatccgcgcaagccgc

SEQ ID NO: 3147 - DNA, 35 bp, Artificial Sequence
  Synthetic oligonucleotide
gagtgcgcgtacaatttgtcctcttgccgcttttt

SEQ ID NO: 3148 - DNA, 35 bp, Artificial Sequence
  Synthetic oligonucleotide
taagtcatgggcctcatctatacctgatcgatctc

SEQ ID NO: 3149 - DNA, 36 bp, Artificial Sequence
  Synthetic oligonucleotide
tcaggcgggatatgcgctcagggaagcggggagcaa

SEQ ID NO: 3150 - DNA, 37 bp, Artificial Sequence
  Synthetic oligonucleotide
tgagctcgacctgccgtcgtacaatttcccttactga

SEQ ID NO: 3151 - DNA, 38 bp, Artificial Sequence
  Synthetic oligonucleotide
acttaccgcttaatacacttgccggaccttgtgcttga

SEQ ID NO: 3152 - DNA, 35 bp, Artificial Sequence
  Synthetic oligonucleotide
actatagccacctaacccagcactaaacccacgca

SEQ ID NO: 3153 - DNA, 35 bp, Artificial Sequence
  Synthetic oligonucleotide
acccccccgcttcgtgcacttcactcccgaaatcc

SEQ ID NO: 3154 - DNA, 35 bp, Artificial Sequence
  Synthetic oligonucleotide
gccgcaccataactttagcctacccagtgccctgc

SEQ ID NO: 3155 - DNA, 36 bp, Artificial Sequence
  Synthetic oligonucleotide
tgccaccaaatacccaaccctagagtagccttatta

SEQ ID NO: 3156 - DNA, 37 bp, Artificial Sequence
  Synthetic oligonucleotide
actctagccacttgatccaccacgtcggttcccacga

SEQ ID NO: 3157 - DNA, 35 bp, Artificial Sequence
  Synthetic oligonucleotide
ttagcgataaacacatcatcccggacacgccgtgt

SEQ ID NO: 3158 - DNA, 38 bp, Artificial Sequence
  Synthetic oligonucleotide
taccgtcgctcaaaaccggcctaccctaaacccactga

SEQ ID NO: 3159 - DNA, 37 bp, Artificial Sequence
  Synthetic oligonucleotide
accgccgctctactctgtcaccgaacgccctttggga

SEQ ID NO: 3160 - DNA, 38 bp, Artificial Sequence
  Synthetic oligonucleotide
agcccgacccgcttgcctaaacccacccatgacactga

SEQ ID NO: 3161 - DNA, 35 bp, Artificial Sequence
  Synthetic oligonucleotide
aggtacccaccgcaaagcaccagtaaccacaaccc

SEQ ID NO: 3162 - DNA, 37 bp, Artificial Sequence
  Synthetic oligonucleotide
gcatccgaccaatagacccacacatctgtaccaaaga

SEQ ID NO: 3163 - DNA, 35 bp, Artificial Sequence
  Synthetic oligonucleotide
tcccgccgctaccgtaagccactccgaagtactca

SEQ ID NO: 3164 - DNA, 35 bp, Artificial Sequence
  Synthetic oligonucleotide
acgccagaccacccgatatccccccaaatggtaac

SEQ ID NO: 3165 - DNA, 38 bp, Artificial Sequence
  Synthetic oligonucleotide
aaacccacttcttacccggtaatctgccgaccgcatga

SEQ ID NO: 3166 - DNA, 35 bp, Artificial Sequence
  Synthetic oligonucleotide
acgcgtgggctactaaactccatcaccccgtgccc

SEQ ID NO: 3167 - DNA, 36 bp, Artificial Sequence
  Synthetic oligonucleotide
actattccgcatcattgagcacccgaccgaccaaaa

SEQ ID NO: 3168 - DNA, 35 bp, Artificial Sequence
  Synthetic oligonucleotide
acacaaaggctataaccgccgactctccaccagcc

SEQ ID NO: 3169 - DNA, 36 bp, Artificial Sequence
  Synthetic oligonucleotide
accaacaccaaccttctacgccgtaccctctgcaaa

SEQ ID NO: 3170 - DNA, 35 bp, Artificial Sequence
  Synthetic oligonucleotide
aaaccgctatttaccccggaccacgttgacaccga

SEQ ID NO: 3171 - DNA, 37 bp, Artificial Sequence
  Synthetic oligonucleotide
tacgtccaccccgaatcctaattcatacacctaaaga

SEQ ID NO: 3172 - DNA, 36 bp, Artificial Sequence
  Synthetic oligonucleotide
aaatgccacatcacttattcaccccgcgcaccccga

SEQ ID NO: 3173 - DNA, 37 bp, Artificial Sequence
  Synthetic oligonucleotide
acaatcaccttacaccttacgacctgcttaatagaga

SEQ ID NO: 3174 - DNA, 35 bp, Artificial Sequence
  Synthetic oligonucleotide
gttcgtgtacgtcgcattaaccctaccataaaacc

SEQ ID NO: 3175 - DNA, 37 bp, Artificial Sequence
  Synthetic oligonucleotide
gcgtatcaaaaaacccaccgctaactaccacaaccga

SEQ ID NO: 3176 - DNA, 38 bp, Artificial Sequence
  Synthetic oligonucleotide
gtgaacccacctgcgccctacactattaaacgagctga

SEQ ID NO: 3177 - DNA, 35 bp, Artificial Sequence
  Synthetic oligonucleotide
tcaacatgcccacatacaccagacacactatacac

SEQ ID NO: 3178 - DNA, 35 bp, Artificial Sequence
  Synthetic oligonucleotide
catgcaacccgcacttaggcgcgagccaattacca

SEQ ID NO: 3179 - DNA, 37 bp, Artificial Sequence
  Synthetic oligonucleotide
acccccaatccttataccataaacacatgaccggtga

SEQ ID NO: 3180 - DNA, 37 bp, Artificial Sequence
  Synthetic oligonucleotide
accggtcaaccccccacagaacatttcccgtcaccga

SEQ ID NO: 3181 - DNA, 37 bp, Artificial Sequence
  Synthetic oligonucleotide
acatgaatccaactaaaacccgctccgtgccgaacga

SEQ ID NO: 3182 - DNA, 35 bp, Artificial Sequence
  Synthetic oligonucleotide
atcccccaaacacaaacgcgagtttcccgggtcca

SEQ ID NO: 3183 - DNA, 38 bp, Artificial Sequence
  Synthetic oligonucleotide
ctctgcgcgagtcaccctcacctagatccctgatatga

SEQ ID NO: 3184 - DNA, 35 bp, Artificial Sequence
  Synthetic oligonucleotide
ctacccaacggtcacacccaccgcgtatccactac

SEQ ID NO: 3185 - DNA, 35 bp, Artificial Sequence
  Synthetic oligonucleotide
ttacacccgtcaactaaccatacccacgagagagc

SEQ ID NO: 3186 - DNA, 34 bp, Artificial Sequence
  Synthetic oligonucleotide
accccactactaccctctcgtccgcctaactgtc

SEQ ID NO: 3187 - DNA, 36 bp, Artificial Sequence
  Synthetic oligonucleotide
accagtccatatcccgccattgtgtcgttcgatcga

SEQ ID NO: 3188 - DNA, 37 bp, Artificial Sequence
  Synthetic oligonucleotide
gccaccccctaccctaacgacccaatatgactggtga

SEQ ID NO: 3189 - DNA, 38 bp, Artificial Sequence
  Synthetic oligonucleotide
caccaaatatcaagtgcctctctaaccttctgacctga

SEQ ID NO: 3190 - DNA, 36 bp, Artificial Sequence
  Synthetic oligonucleotide
actgtcactaccccacgcgcaaccaacaaataccca

SEQ ID NO: 3191 - DNA, 37 bp, Artificial Sequence
  Synthetic oligonucleotide
agctcgactaaaccacccgtataaaagctatacccga

SEQ ID NO: 3192 - DNA, 35 bp, Artificial Sequence
  Synthetic oligonucleotide
gagcgccctacttcaactcccaaaccacatgaccg

SEQ ID NO: 3193 - DNA, 35 bp, Artificial Sequence
  Synthetic oligonucleotide
aacaaagttcacccatcccacaaccccaattcgac

SEQ ID NO: 3194 - DNA, 37 bp, Artificial Sequence
  Synthetic oligonucleotide
cttctgacccgtagaccacaacttcccgacttcccga

SEQ ID NO: 3195 - DNA, 35 bp, Artificial Sequence
  Synthetic oligonucleotide
accccataccattaactccggattccccagtgctc

SEQ ID NO: 3196 - DNA, 38 bp, Artificial Sequence
  Synthetic oligonucleotide
agccacccacaaaacgcgcaatcagtaaacccacctga

SEQ ID NO: 3197 - DNA, 35 bp, Artificial Sequence
  Synthetic oligonucleotide
tcctaacgctgtcgacgccaccacccggacccact

SEQ ID NO: 3198 - DNA, 36 bp, Artificial Sequence
  Synthetic oligonucleotide
ccaatacccccgcgcccaatcccacacgttatcgta

SEQ ID NO: 3199 - DNA, 36 bp, Artificial Sequence
  Synthetic oligonucleotide
agcttacccactcccgaaagacaccctgacaccgta

SEQ ID NO: 3200 - DNA, 36 bp, Artificial Sequence
  Synthetic oligonucleotide
atgacctaatccaccacccctgcacctcagtctaca

SEQ ID NO: 3201 - DNA, 35 bp, Artificial Sequence
  Synthetic oligonucleotide
atcccgcacacctaaagcaaacgtggcttaggtcc

SEQ ID NO: 3202 - DNA, 37 bp, Artificial Sequence
  Synthetic oligonucleotide
atcctccgcccgggcactaaccagctcctgaccacga

SEQ ID NO: 3203 - DNA, 35 bp, Artificial Sequence
  Synthetic oligonucleotide
actgcgcccatcagataccaaaacctgcaaaccgc

SEQ ID NO: 3204 - DNA, 36 bp, Artificial Sequence
  Synthetic oligonucleotide
gccacccgcctttagccctacagatacacacactaa

SEQ ID NO: 3205 - DNA, 36 bp, Artificial Sequence
  Synthetic oligonucleotide
accccctacgccggctgactaaaccgcacaccctca

SEQ ID NO: 3206 - DNA, 36 bp, Artificial Sequence
  Synthetic oligonucleotide
gtttaccgtacccccttgcactgcccgaccaaccca

SEQ ID NO: 3207 - DNA, 35 bp, Artificial Sequence
  Synthetic oligonucleotide
actggaaccccaatcggagcgaagcctgactaccg

SEQ ID NO: 3208 - DNA, 37 bp, Artificial Sequence
  Synthetic oligonucleotide
tgccaacctaccataccatcaattgacagatacctga

SEQ ID NO: 3209 - DNA, 37 bp, Artificial Sequence
  Synthetic oligonucleotide
tcacccacgccatatactgcactccaaaccccgctga

SEQ ID NO: 3210 - DNA, 36 bp, Artificial Sequence
  Synthetic oligonucleotide
aaactgttcctgtgacaaaaccctcaacccatacca

SEQ ID NO: 3211 - DNA, 37 bp, Artificial Sequence
  Synthetic oligonucleotide
acgccacctacccacctcactatgaaatatactcgga

SEQ ID NO: 3212 - DNA, 35 bp, Artificial Sequence
  Synthetic oligonucleotide
gtccccttaagtccacccatacacgttactgaccc

SEQ ID NO: 3213 - DNA, 37 bp, Artificial Sequence
  Synthetic oligonucleotide
gagaacccaccagcaccaattcacaaacacttacgga

SEQ ID NO: 3214 - DNA, 36 bp, Artificial Sequence
  Synthetic oligonucleotide
acaagcctaacccgacccctagttctcacgttgaca

SEQ ID NO: 3215 - DNA, 38 bp, Artificial Sequence
  Synthetic oligonucleotide
acaccctccaaagcacaaacctacccattagccaatga

SEQ ID NO: 3216 - DNA, 36 bp, Artificial Sequence
  Synthetic oligonucleotide
aagtaccccaactcactgtaggtcactacgacaaca

SEQ ID NO: 3217 - DNA, 35 bp, Artificial Sequence
  Synthetic oligonucleotide
acgccgacccgatattttagcaaatatcacctacc

SEQ ID NO: 3218 - DNA, 38 bp, Artificial Sequence
  Synthetic oligonucleotide
acgttaacacccgcctcccacacccacttgacaggtga

SEQ ID NO: 3219 - DNA, 35 bp, Artificial Sequence
  Synthetic oligonucleotide
catcaagcagtcaacctgactcatcccatgtaccc

SEQ ID NO: 3220 - DNA, 37 bp, Artificial Sequence
  Synthetic oligonucleotide
acgcagttccaccacccattgtcaccaagatcatcga

SEQ ID NO: 3221 - DNA, 37 bp, Artificial Sequence
  Synthetic oligonucleotide
ctatgcaacacccgccttcgcacgttcacactaccga

SEQ ID NO: 3222 - DNA, 35 bp, Artificial Sequence
  Synthetic oligonucleotide
agcatgacacggcacctaccacccgaacgaccatc

SEQ ID NO: 3223 - DNA, 37 bp, Artificial Sequence
  Synthetic oligonucleotide
ttaataccgatttacacgctacccgtcccgggaggga

SEQ ID NO: 3224 - DNA, 37 bp, Artificial Sequence
  Synthetic oligonucleotide
aatacgctccagctcacctaaccctactaatcctcga

SEQ ID NO: 3225 - DNA, 35 bp, Artificial Sequence
  Synthetic oligonucleotide
acggaacaatcccccactatgctccacttcttact

SEQ ID NO: 3226 - DNA, 35 bp, Artificial Sequence
  Synthetic oligonucleotide
gcacacaaacattccaccaggtgacaaccccgaca

SEQ ID NO: 3227 - DNA, 37 bp, Artificial Sequence
  Synthetic oligonucleotide
atccgctctcacgacgccgaccaaacacattccggga

SEQ ID NO: 3228 - DNA, 35 bp, Artificial Sequence
  Synthetic oligonucleotide
tctgcacgcgaagctccgccgaccacaatacaaac

SEQ ID NO: 3229 - DNA, 36 bp, Artificial Sequence
  Synthetic oligonucleotide
tgaaatcgaccacttgagagcgtacttaagcacccg

SEQ ID NO: 3230 - DNA, 34 bp, Artificial Sequence
  Synthetic oligonucleotide
aaccgaatcccaggacctaactcatcccatgaaa

SEQ ID NO: 3231 - DNA, 35 bp, Artificial Sequence
  Synthetic oligonucleotide
atcctcctctgacctcgatctcccttaccaaacgg

SEQ ID NO: 3232 - DNA, 38 bp, Artificial Sequence
  Synthetic oligonucleotide
tggtccaacccccacgccgccatcactggacaacttga

SEQ ID NO: 3233 - DNA, 36 bp, Artificial Sequence
  Synthetic oligonucleotide
gcaccgcgcctctaccctacttacctaccccatcaa

SEQ ID NO: 3234 - DNA, 36 bp, Artificial Sequence
  Synthetic oligonucleotide
ggggcgcacgaaatcagaacaaccctaaaaccccta

SEQ ID NO: 3235 - DNA, 38 bp, Artificial Sequence
  Synthetic oligonucleotide
gactacccgctcactcacccgtcccaaattagatatga

SEQ ID NO: 3236 - DNA, 35 bp, Artificial Sequence
  Synthetic oligonucleotide
tacgccatcaaacccgatacctaaatttagcacac

SEQ ID NO: 3237 - DNA, 36 bp, Artificial Sequence
  Synthetic oligonucleotide
ttgcagaacacgaccaccaccgctttagagccacca

SEQ ID NO: 3238 - DNA, 35 bp, Artificial Sequence
  Synthetic oligonucleotide
taactcggtcctgatgctctacccgtatcaaccct

SEQ ID NO: 3239 - DNA, 35 bp, Artificial Sequence
  Synthetic oligonucleotide
ccgcatcccacagaactcggctactcaaaccacta

SEQ ID NO: 3240 - DNA, 35 bp, Artificial Sequence
  Synthetic oligonucleotide
gcagcactccacatcatcaaccatccacaaacctc

SEQ ID NO: 3241 - DNA, 35 bp, Artificial Sequence
  Synthetic oligonucleotide
actacatagaaggacccaaacatccctaccgcgct

SEQ ID NO: 3242 - DNA, 35 bp, Artificial Sequence
  Synthetic oligonucleotide
aacggcctaacacttagaaacctgactagccctac

SEQ ID NO: 3243 - DNA, 35 bp, Artificial Sequence
  Synthetic oligonucleotide
gccccgccgggctatccgcgacctagcctccctct

SEQ ID NO: 3244 - DNA, 36 bp, Artificial Sequence
  Synthetic oligonucleotide
gagtaatgctacccacaacccgcctaaaccatatca

SEQ ID NO: 3245 - DNA, 37 bp, Artificial Sequence
  Synthetic oligonucleotide
ctcactagactcccaactaaccttcttgctccctaga

SEQ ID NO: 3246 - DNA, 38 bp, Artificial Sequence
  Synthetic oligonucleotide
gaaactcaaacacactaagatcctaatcatatccatga

SEQ ID NO: 3247 - DNA, 38 bp, Artificial Sequence
  Synthetic oligonucleotide
gtcgtagcacgctccttacacgctttaatcctagatga

SEQ ID NO: 3248 - DNA, 35 bp, Artificial Sequence
  Synthetic oligonucleotide
aacgaaacggtctgctaccaccatccccacacacc

SEQ ID NO: 3249 - DNA, 35 bp, Artificial Sequence
  Synthetic oligonucleotide
ccccagagaacccgcacctagtcacacgaccactt

SEQ ID NO: 3250 - DNA, 35 bp, Artificial Sequence
  Synthetic oligonucleotide
ccgagtaccgtcattaatcaactagccgacaccac

SEQ ID NO: 3251 - DNA, 37 bp, Artificial Sequence
  Synthetic oligonucleotide
actgcccgattgtcgctggaattccgctatctccgga

SEQ ID NO: 3252 - DNA, 36 bp, Artificial Sequence
  Synthetic oligonucleotide
tgcgtccccacgaaaccatagccaacccaccggaca

SEQ ID NO: 3253 - DNA, 36 bp, Artificial Sequence
  Synthetic oligonucleotide
accgcaggtcatttcccagtactaccgacagacgca

SEQ ID NO: 3254 - DNA, 35 bp, Artificial Sequence
  Synthetic oligonucleotide
gcccttatgcaaaacccgcggaccggagaccatac

SEQ ID NO: 3255 - DNA, 38 bp, Artificial Sequence
  Synthetic oligonucleotide
acccataagcctagaaccaccctatcacacgaagttga

SEQ ID NO: 3256 - DNA, 37 bp, Artificial Sequence
  Synthetic oligonucleotide
tagtccgagcacgcctataaaatgagccctaattctg

SEQ ID NO: 3257 - DNA, 35 bp, Artificial Sequence
  Synthetic oligonucleotide
cacaccactcgtagctgtctgtcccccgctttagt

SEQ ID NO: 3258 - DNA, 37 bp, Artificial Sequence
  Synthetic oligonucleotide
cgttaccgtactaatcccacccaggcctattcgtgga

SEQ ID NO: 3259 - DNA, 36 bp, Artificial Sequence
  Synthetic oligonucleotide
gcccggggcccactagatccagactcaacaccgcca

SEQ ID NO: 3260 - DNA, 34 bp, Artificial Sequence
  Synthetic oligonucleotide
ccagcatatgccctacccgcatccgatcaactat

SEQ ID NO: 3261 - DNA, 35 bp, Artificial Sequence
  Synthetic oligonucleotide
tccatatcaaaccaccctaaccagacgaatcgggc

SEQ ID NO: 3262 - DNA, 37 bp, Artificial Sequence
  Synthetic oligonucleotide
acctttgaccgcccatgaactcaccgggggacggtga

SEQ ID NO: 3263 - DNA, 35 bp, Artificial Sequence
  Synthetic oligonucleotide
ccatcccgctccctgtaacggaatcactcccctcc

SEQ ID NO: 3264 - DNA, 35 bp, Artificial Sequence
  Synthetic oligonucleotide
cctgcacaccgatacaatgcctaaaaccgcatgtc

SEQ ID NO: 3265 - DNA, 37 bp, Artificial Sequence
  Synthetic oligonucleotide
gcctctgaatcaacccgctagcacttctagacttgga

SEQ ID NO: 3266 - DNA, 37 bp, Artificial Sequence
  Synthetic oligonucleotide
aacgtcaaaaactccgcgccattaaccccaaccggga

SEQ ID NO: 3267 - DNA, 37 bp, Artificial Sequence
  Synthetic oligonucleotide
ttatctacttagcccgcccttactacagtccgcagga

SEQ ID NO: 3268 - DNA, 37 bp, Artificial Sequence
  Synthetic oligonucleotide
ttcacgccgacccgaccctgctttaaagagttcacga

SEQ ID NO: 3269 - DNA, 35 bp, Artificial Sequence
  Synthetic oligonucleotide
agtcactcaccgcgcacgaacgaaacccgctgcac

SEQ ID NO: 3270 - DNA, 38 bp, Artificial Sequence
  Synthetic oligonucleotide
gtccgttcttgtcccgccaaaccatagtaatccgatga

SEQ ID NO: 3271 - DNA, 38 bp, Artificial Sequence
  Synthetic oligonucleotide
actctcaatcctcaggctctgcccttccaaccagatga

SEQ ID NO: 3272 - DNA, 38 bp, Artificial Sequence
  Synthetic oligonucleotide
aacccctattccgtggacactcctatcatgcacgctga

SEQ ID NO: 3273 - DNA, 35 bp, Artificial Sequence
  Synthetic oligonucleotide
accaataaccaactatataccttagatgacttgaa

SEQ ID NO: 3274 - DNA, 37 bp, Artificial Sequence
  Synthetic oligonucleotide
gaccctcagtgcctaccccagtgcaaacaattctgga

SEQ ID NO: 3275 - DNA, 38 bp, Artificial Sequence
  Synthetic oligonucleotide
acaccgtgcccaaactatacggaccacaccgactatga

SEQ ID NO: 3276 - DNA, 36 bp, Artificial Sequence
  Synthetic oligonucleotide
aacctgtcttttcgctatcccacatccgagagacca

SEQ ID NO: 3277 - DNA, 38 bp, Artificial Sequence
  Synthetic oligonucleotide
aaacccgcatctgggaaccggccccaacttggccttga

SEQ ID NO: 3278 - DNA, 37 bp, Artificial Sequence
  Synthetic oligonucleotide
tccgccagtacgcatccaatatagtccggactatgga

SEQ ID NO: 3279 - DNA, 36 bp, Artificial Sequence
  Synthetic oligonucleotide
tgacacgaacgttatgcaatcccgactctggacaaa

SEQ ID NO: 3280 - DNA, 35 bp, Artificial Sequence
  Synthetic oligonucleotide
gcctggcactatactgagtccatccgtacatcccg

SEQ ID NO: 3281 - DNA, 36 bp, Artificial Sequence
  Synthetic oligonucleotide
aatcgtacaggtgtctcccccaccaccccgcgaaaa

SEQ ID NO: 3282 - DNA, 36 bp, Artificial Sequence
  Synthetic oligonucleotide
aacccgcaccccacaactgctacctactggtgcata

SEQ ID NO: 3283 - DNA, 35 bp, Artificial Sequence
  Synthetic oligonucleotide
acaaccccgcaccgttactgccacctctactcacg

SEQ ID NO: 3284 - DNA, 38 bp, Artificial Sequence
  Synthetic oligonucleotide
gaggcattatatcatcccgcatccaatatagaccatga

SEQ ID NO: 3285 - DNA, 37 bp, Artificial Sequence
  Synthetic oligonucleotide
gtcgcgttctacgccccaaccctagctcccttccaga

SEQ ID NO: 3286 - DNA, 36 bp, Artificial Sequence
  Synthetic oligonucleotide
acccaagcaagaatccgactatagctcacctagaca

SEQ ID NO: 3287 - DNA, 37 bp, Artificial Sequence
  Synthetic oligonucleotide
tcttgcacctgcccgcctcagtagactacccgctgga

SEQ ID NO: 3288 - DNA, 38 bp, Artificial Sequence
  Synthetic oligonucleotide
aagttactcctccatctctgcacatggcactagcatga

SEQ ID NO: 3289 - DNA, 36 bp, Artificial Sequence
  Synthetic oligonucleotide
atgcaggcaattaggacatttcactctcgcccgtga

SEQ ID NO: 3290 - DNA, 38 bp, Artificial Sequence
  Synthetic oligonucleotide
acccatattgatccccaccaccaccatcaacgttctga

SEQ ID NO: 3291 - DNA, 37 bp, Artificial Sequence
  Synthetic oligonucleotide
aaagcccagtaactcccggaagattagtaccccccga

SEQ ID NO: 3292 - DNA, 37 bp, Artificial Sequence
  Synthetic oligonucleotide
acttaaggagatcctccccactacacatacccaaaga

SEQ ID NO: 3293 - DNA, 36 bp, Artificial Sequence
  Synthetic oligonucleotide
cccaaatacctattcccgccagtccacgcttatgta

SEQ ID NO: 3294 - DNA, 35 bp, Artificial Sequence
  Synthetic oligonucleotide
aggcacctattacgtccaacccatcccactcggtc

SEQ ID NO: 3295 - DNA, 36 bp, Artificial Sequence
  Synthetic oligonucleotide
acccgccacgaaagcccgactaggtaatacgccgta

SEQ ID NO: 3296 - DNA, 37 bp, Artificial Sequence
  Synthetic oligonucleotide
atcgctccgtttaaatcctaaacccacagccgcttga

SEQ ID NO: 3297 - DNA, 38 bp, Artificial Sequence
  Synthetic oligonucleotide
tgtcatcccacctaaacggggaccatgcatctaaatga

SEQ ID NO: 3298 - DNA, 36 bp, Artificial Sequence
  Synthetic oligonucleotide
gagcactgagtctgacccacaccgcacaggggacta

SEQ ID NO: 3299 - DNA, 38 bp, Artificial Sequence
  Synthetic oligonucleotide
ggtaatccgcctccacacttgcgtgtcccatcatatga

SEQ ID NO: 3300 - DNA, 38 bp, Artificial Sequence
  Synthetic oligonucleotide
tgacaatgacggacccgatactaacccgcagtacttga

SEQ ID NO: 3301 - DNA, 35 bp, Artificial Sequence
  Synthetic oligonucleotide
ggagaaacgtacttgccatccaccccggacatacc

SEQ ID NO: 3302 - DNA, 37 bp, Artificial Sequence
  Synthetic oligonucleotide
acatttgccgcctattcgggcccgcctatcctgtaga

SEQ ID NO: 3303 - DNA, 38 bp, Artificial Sequence
  Synthetic oligonucleotide
acgctcgccgccttttcctagctgtatcccaatgatga

SEQ ID NO: 3304 - DNA, 36 bp, Artificial Sequence
  Synthetic oligonucleotide
cctcgccgcttctgccctacgagtaccccaactaca

SEQ ID NO: 3305 - DNA, 37 bp, Artificial Sequence
  Synthetic oligonucleotide
acccgcccgcttacctgagatatcgagagccccatga

SEQ ID NO: 3306 - DNA, 35 bp, Artificial Sequence
  Synthetic oligonucleotide
ttcccgtccggtactgccctaatcataaagaaacg

SEQ ID NO: 3307 - DNA, 37 bp, Artificial Sequence
  Synthetic oligonucleotide
gtgggtcatcacttcccgcaaatcccgattcctacga

SEQ ID NO: 3308 - DNA, 35 bp, Artificial Sequence
  Synthetic oligonucleotide
acaccgctttgctcggcgacttatcccaaatggta

SEQ ID NO: 3309 - DNA, 37 bp, Artificial Sequence
  Synthetic oligonucleotide
gcgtatcaaaaaacccaccgctaactacaacaaccga

SEQ ID NO: 3310 - DNA, 37 bp, Artificial Sequence
  Synthetic oligonucleotide
ggcccgcctgccaccgaaaacgcgagtacttccaaga

SEQ ID NO: 3311 - DNA, 35 bp, Artificial Sequence
  Synthetic oligonucleotide
gccccagcgcccacctcattccaaatccacgcaat

SEQ ID NO: 3312 - DNA, 37 bp, Artificial Sequence
  Synthetic oligonucleotide
ctcaggctgcaactacccaggttacccatcacttcga

SEQ ID NO: 3313 - DNA, 35 bp, Artificial Sequence
  Synthetic oligonucleotide
acgccgtttctgtgctaccaaccccctgtgctact

SEQ ID NO: 3314 - DNA, 36 bp, Artificial Sequence
  Synthetic oligonucleotide
aaccaccaactctacgcgagttatcctgcccgacga

SEQ ID NO: 3315 - DNA, 36 bp, Artificial Sequence
  Synthetic oligonucleotide
ccctaccacccgaaaacttgaaatcacccgcgtata

SEQ ID NO: 3316 - DNA, 35 bp, Artificial Sequence
  Synthetic oligonucleotide
gacactgcactctgtaccccaacctatgcctctac

SEQ ID NO: 3317 - DNA, 38 bp, Artificial Sequence
  Synthetic oligonucleotide
ctactataatccgctccaccaaaaaatagcctcagtga

SEQ ID NO: 3318 - DNA, 38 bp, Artificial Sequence
  Synthetic oligonucleotide
aggtgtcaactgccactacatccacctgtttccgatga

SEQ ID NO: 3319 - DNA, 38 bp, Artificial Sequence
  Synthetic oligonucleotide
tgtagtattgccttccctcttccgctataaaatgatga

SEQ ID NO: 3320 - DNA, 37 bp, Artificial Sequence
  Synthetic oligonucleotide
gagaacgcccattcgataaccaaaccaacttataaga

SEQ ID NO: 3321 - DNA, 38 bp, Artificial Sequence
  Synthetic oligonucleotide
aggtcatttctactccgattgccagtcaccgatcgtga

SEQ ID NO: 3322 - DNA, 36 bp, Artificial Sequence
  Synthetic oligonucleotide
acttccttggcctggattctacccaataagaactca

SEQ ID NO: 3323 - DNA, 35 bp, Artificial Sequence
  Synthetic oligonucleotide
cttacaaatccttgcctacgacccgaccactggcc

SEQ ID NO: 3324 - DNA, 37 bp, Artificial Sequence
  Synthetic oligonucleotide
gtgcgcctactgctcctacctctgaccacatgtgtga

SEQ ID NO: 3325 - DNA, 35 bp, Artificial Sequence
  Synthetic oligonucleotide
cccctgcctaaaccggttagtgccttgccgctccc

SEQ ID NO: 3326 - DNA, 37 bp, Artificial Sequence
  Synthetic oligonucleotide
actgagtgcatcccacgtactttacaaatccgactga

SEQ ID NO: 3327 - DNA, 35 bp, Artificial Sequence
  Synthetic oligonucleotide
aatccgatcttaccgctatctgataccgagaatta

SEQ ID NO: 3328 - DNA, 38 bp, Artificial Sequence
  Synthetic oligonucleotide
cccaccattacgacctataccccatgttacacgtatga

SEQ ID NO: 3329 - DNA, 35 bp, Artificial Sequence
  Synthetic oligonucleotide
caccgccttagtcccgtaaatactatgctcctctg

SEQ ID NO: 3330 - DNA, 37 bp, Artificial Sequence
  Synthetic oligonucleotide
acagtatacatcacacccctcattttcggagtgccga

SEQ ID NO: 3331 - DNA, 38 bp, Artificial Sequence
  Synthetic oligonucleotide
gcccagtaccggtccaccccgcttccgtactaccctga

SEQ ID NO: 3332 - DNA, 36 bp, Artificial Sequence
  Synthetic oligonucleotide
gaacgtcaccgtatcccccgcatgatcagggcccca

SEQ ID NO: 3333 - DNA, 37 bp, Artificial Sequence
  Synthetic oligonucleotide
gcgcctacgattgacaccgccggaacatacccacaga

SEQ ID NO: 3334 - DNA, 38 bp, Artificial Sequence
  Synthetic oligonucleotide
tattgccccaagatcgacccaacctcaacgcccaatta

SEQ ID NO: 3335 - DNA, 38 bp, Artificial Sequence
  Synthetic oligonucleotide
tccactaccggcgccgacgggccgcatgtaatttctga

SEQ ID NO: 3336 - DNA, 37 bp, Artificial Sequence
  Synthetic oligonucleotide
tcaccaaacgtcatccttcacccgagactgtagggga

SEQ ID NO: 3337 - DNA, 35 bp, Artificial Sequence
  Synthetic oligonucleotide
accgcctctatcggaactttgcttagatactacgc

SEQ ID NO: 3338 - DNA, 37 bp, Artificial Sequence
  Synthetic oligonucleotide
ggacaaaaaacaccttagccccaaatcactaccacta

SEQ ID NO: 3339 - DNA, 37 bp, Artificial Sequence
  Synthetic oligonucleotide
cgcgagccacacctccgcacatttaccctcgggatga

SEQ ID NO: 3340 - DNA, 38 bp, Artificial Sequence
  Synthetic oligonucleotide
ttgtggcttcacccatcaatctcctctgggtctactga

SEQ ID NO: 3341 - DNA, 36 bp, Artificial Sequence
  Synthetic oligonucleotide
ctctgctgactatacccatcataacacgcgagccta

SEQ ID NO: 3342 - DNA, 37 bp, Artificial Sequence
  Synthetic oligonucleotide
taacagcccgacacacccgaactactatggacactga

SEQ ID NO: 3343 - DNA, 38 bp, Artificial Sequence
  Synthetic oligonucleotide
acaccgcatctgccctcggtcaccctacacatcattga

SEQ ID NO: 3344 - DNA, 35 bp, Artificial Sequence
  Synthetic oligonucleotide
actgcctacactacttcgtgcgaacgatagctctt

SEQ ID NO: 3345 - DNA, 35 bp, Artificial Sequence
  Synthetic oligonucleotide
aattccgctctcctgaacgcttggagtcccattca

SEQ ID NO: 3346 - DNA, 35 bp, Artificial Sequence
  Synthetic oligonucleotide
tgctggtcatcacaaccgacgataacgcttaatat

SEQ ID NO: 3347 - DNA, 35 bp, Artificial Sequence
  Synthetic oligonucleotide
gtgacggaacctactactgcactgaaccaccgccc

SEQ ID NO: 3348 - DNA, 35 bp, Artificial Sequence
  Synthetic oligonucleotide
gcccgcgattcacgctccacttaatccgataacct

SEQ ID NO: 3349 - DNA, 37 bp, Artificial Sequence
  Synthetic oligonucleotide
gatatgatcccacttcctagacacctatattacctga

SEQ ID NO: 3350 - DNA, 36 bp, Artificial Sequence
  Synthetic oligonucleotide
cttatctgctgtccctttcgcttggatcacgattaa

SEQ ID NO: 3351 - DNA, 37 bp, Artificial Sequence
  Synthetic oligonucleotide
aatcaactctcatgccgcccatcagtccacgttatga

SEQ ID NO: 3352 - DNA, 36 bp, Artificial Sequence
  Synthetic oligonucleotide
cgcttactcgtactcatcatcacgtgacattcacta

SEQ ID NO: 3353 - DNA, 36 bp, Artificial Sequence
  Synthetic oligonucleotide
tccctatccccccgccagtaaaacccacatgacgga

SEQ ID NO: 3354 - DNA, 36 bp, Artificial Sequence
  Synthetic oligonucleotide
actccatattcacgataacccacagatccgttaaaa

SEQ ID NO: 3355 - DNA, 37 bp, Artificial Sequence
  Synthetic oligonucleotide
tccatcccgactaatttttagacctttgctacacaga

SEQ ID NO: 3356 - DNA, 37 bp, Artificial Sequence
  Synthetic oligonucleotide
gcgttcgttctatactttctaacgttctttacacaga

SEQ ID NO: 3357 - DNA, 37 bp, Artificial Sequence
  Synthetic oligonucleotide
taccggataacaacgccaattttcattaatttcaaga

SEQ ID NO: 3358 - DNA, 37 bp, Artificial Sequence
  Synthetic oligonucleotide
ggactacacgtgagcgcttattctttgactttacaga

SEQ ID NO: 3359 - DNA, 35 bp, Artificial Sequence
  Synthetic oligonucleotide
atcacgggagtgatagtctgggccctgaaactact

SEQ ID NO: 3360 - DNA, 35 bp, Artificial Sequence
  Synthetic oligonucleotide
aaatcccatcgagcccttaacccagaccaactcaa

SEQ ID NO: 3361 - DNA, 35 bp, Artificial Sequence
  Synthetic oligonucleotide
atcatcccggcttttgagtaaaccagcttttcacc

SEQ ID NO: 3362 - DNA, 35 bp, Artificial Sequence
  Synthetic oligonucleotide
gagtacttgactctggtatattttttctccccatt

SEQ ID NO: 3363 - DNA, 35 bp, Artificial Sequence
  Synthetic oligonucleotide
actttacacccgcgaacaatattacctccccgaac

SEQ ID NO: 3364 - DNA, 37 bp, Artificial Sequence
  Synthetic oligonucleotide
aacctggccattacactttccttttgagttctctaga

SEQ ID NO: 3365 - DNA, 36 bp, Artificial Sequence
  Synthetic oligonucleotide
gagtaggcctctgcactcccttctcgagatccgtaa

SEQ ID NO: 3366 - DNA, 35 bp, Artificial Sequence
  Synthetic oligonucleotide
tcttggaggacttttttttgacggttttttgtggt

SEQ ID NO: 3367 - DNA, 37 bp, Artificial Sequence
  Synthetic oligonucleotide
acgcacatctcattccgaataccttacgaataacaga

SEQ ID NO: 3368 - DNA, 37 bp, Artificial Sequence
  Synthetic oligonucleotide
gacctatacatatccgcgcacataaactcgaactaga

SEQ ID NO: 3369 - DNA, 35 bp, Artificial Sequence
  Synthetic oligonucleotide
ggaccgtttttgttttattgatgccgattgaccgc

SEQ ID NO: 3370 - DNA, 38 bp, Artificial Sequence
  Synthetic oligonucleotide
atcttttgcctgatcgcttcgaaattcgttccgcctga

SEQ ID NO: 3371 - DNA, 37 bp, Artificial Sequence
  Synthetic oligonucleotide
ttttgcatatacccttggttcttgttccatccgagga

SEQ ID NO: 3372 - DNA, 35 bp, Artificial Sequence
  Synthetic oligonucleotide
atttttgcaacatttgaaatttgggcattgggaac

SEQ ID NO: 3373 - DNA, 36 bp, Artificial Sequence
  Synthetic oligonucleotide
gagcacttaatttgtttgtatactgatggttttggt

SEQ ID NO: 3374 - DNA, 38 bp, Artificial Sequence
  Synthetic oligonucleotide
cgtagtaccggtctacttcattgcccacttgtatttga

SEQ ID NO: 3375 - DNA, 38 bp, Artificial Sequence
  Synthetic oligonucleotide
atgtggtggcctgaattgagtcctttttgttttgctga

SEQ ID NO: 3376 - DNA, 37 bp, Artificial Sequence
  Synthetic oligonucleotide
acttaccctggtgcactgaaagtgaacatttgtttga

SEQ ID NO: 3377 - DNA, 37 bp, Artificial Sequence
  Synthetic oligonucleotide
ttgcaactataggttgcattggtttttcgatacttga

SEQ ID NO: 3378 - DNA, 35 bp, Artificial Sequence
  Synthetic oligonucleotide
gacgctactaagtgtcgtgggattttttgctctct

SEQ ID NO: 3379 - DNA, 35 bp, Artificial Sequence
  Synthetic oligonucleotide
gcctggattactttgtgagagtttttggggtttgc

SEQ ID NO: 3380 - DNA, 35 bp, Artificial Sequence
  Synthetic oligonucleotide
ggtatagcggtcttgcaaacttgcaaaatcctctt

SEQ ID NO: 3381 - DNA, 38 bp, Artificial Sequence
  Synthetic oligonucleotide
gagtagttccggtcgtttacgggcttttgtttatttga

SEQ ID NO: 3382 - DNA, 38 bp, Artificial Sequence
  Synthetic oligonucleotide
tgggactttgccgcgaagctcttttctgttatctatga

SEQ ID NO: 3383 - DNA, 35 bp, Artificial Sequence
  Synthetic oligonucleotide
gattcgtagcctttaagttttggattgttgcctct

SEQ ID NO: 3384 - DNA, 35 bp, Artificial Sequence
  Synthetic oligonucleotide
ggggccatttagtatgttgtttctttttacgatgc

SEQ ID NO: 3385 - DNA, 38 bp, Artificial Sequence
  Synthetic oligonucleotide
aaatcgaaatcgggccttttgaaacattgccttagtga

SEQ ID NO: 3386 - DNA, 38 bp, Artificial Sequence
  Synthetic oligonucleotide
ggggctaatcgttcgaatttcgctgtgccatttcttga

SEQ ID NO: 3387 - DNA, 37 bp, Artificial Sequence
  Synthetic oligonucleotide
tttcggatattaactttgcgacctcggggtctatcga

SEQ ID NO: 3388 - DNA, 38 bp, Artificial Sequence
  Synthetic oligonucleotide
tgcattctctcggttagttctgtctgtttttgttttga

SEQ ID NO: 3389 - DNA, 37 bp, Artificial Sequence
  Synthetic oligonucleotide
ttcactctacctctctcttgctctgggcttatagtga

SEQ ID NO: 3390 - DNA, 38 bp, Artificial Sequence
  Synthetic oligonucleotide
ggtttcgaattgttagttcctttagtatgatgccttga

SEQ ID NO: 3391 - DNA, 38 bp, Artificial Sequence
  Synthetic oligonucleotide
gaattgccttagttggaattgatgttatttgtttttga

SEQ ID NO: 3392 - DNA, 38 bp, Artificial Sequence
  Synthetic oligonucleotide
atttcctgcgtgggttcgcctcgaattgcccatcttga

SEQ ID NO: 3393 - DNA, 38 bp, Artificial Sequence
  Synthetic oligonucleotide
gcggagaagctttgtatgttttccaccttggttattga

SEQ ID NO: 3394 - DNA, 35 bp, Artificial Sequence
  Synthetic oligonucleotide
gaaccagctgttgattttaccgccttgcccttttc

SEQ ID NO: 3395 - DNA, 37 bp, Artificial Sequence
  Synthetic oligonucleotide
attttgcccgtgattcttattttgtcgctgattgaga

SEQ ID NO: 3396 - DNA, 37 bp, Artificial Sequence
  Synthetic oligonucleotide
tgcccccggtgtttgctttacctgtaagttttcgtga

SEQ ID NO: 3397 - DNA, 36 bp, Artificial Sequence
  Synthetic oligonucleotide
gctcaccgcgaatattttgcttgggatttctgggga

SEQ ID NO: 3398 - DNA, 35 bp, Artificial Sequence
  Synthetic oligonucleotide
agccttaatgaatgaaccatcaacgaattgctctt

SEQ ID NO: 3399 - DNA, 38 bp, Artificial Sequence
  Synthetic oligonucleotide
gtgacgattgcgaaattgacttctcctcttctgtatga

SEQ ID NO: 3400 - DNA, 38 bp, Artificial Sequence
  Synthetic oligonucleotide
gagttgaatgttacccctctgcacaatattttagttga

SEQ ID NO: 3401 - DNA, 38 bp, Artificial Sequence
  Synthetic oligonucleotide
gcgcaccttggggtttagtcatattacttggttcttga

SEQ ID NO: 3402 - DNA, 38 bp, Artificial Sequence
  Synthetic oligonucleotide
ttttggcctaactccgggtttcgctttcctgcctgtga

SEQ ID NO: 3403 - DNA, 36 bp, Artificial Sequence
  Synthetic oligonucleotide
gagtgaggtttgatttgcctattttcagaggggttc

SEQ ID NO: 3404 - DNA, 38 bp, Artificial Sequence
  Synthetic oligonucleotide
gacggtggtcttggggggggttttgttttccagtatga

SEQ ID NO: 3405 - DNA, 37 bp, Artificial Sequence
  Synthetic oligonucleotide
ttcaggtaggagcatttggtggtcttcgctttcttga

SEQ ID NO: 3406 - DNA, 35 bp, Artificial Sequence
  Synthetic oligonucleotide
tcgggtaggttatccctgtatcaccttttttttgc

SEQ ID NO: 3407 - DNA, 38 bp, Artificial Sequence
  Synthetic oligonucleotide
tcactcatgcacttttgagctttgttgctgaattttga

SEQ ID NO: 3408 - DNA, 38 bp, Artificial Sequence
  Synthetic oligonucleotide
acacgcgctttggttattgtgcttttgcttcaccgtga

SEQ ID NO: 3409 - DNA, 35 bp, Artificial Sequence
  Synthetic oligonucleotide
ttatatctggttgacttttttttgcgggttgcacc

SEQ ID NO: 3410 - DNA, 38 bp, Artificial Sequence
  Synthetic oligonucleotide
ggttgcttatgggtcgtaccatttgcatgattctttga

SEQ ID NO: 3411 - DNA, 37 bp, Artificial Sequence
  Synthetic oligonucleotide
tgcccgtccttggttttcacgtgatttgattgtgcga

SEQ ID NO: 3412 - DNA, 37 bp, Artificial Sequence
  Synthetic oligonucleotide
tgcttctgtaagcggagctattaataggtatctttga

SEQ ID NO: 3413 - DNA, 38 bp, Artificial Sequence
  Synthetic oligonucleotide
ttttccatggttgtttttgcctcatcctctcctagtga

SEQ ID NO: 3414 - DNA, 38 bp, Artificial Sequence
  Synthetic oligonucleotide
agcaccccgatcgttaggggttctgttaaattctttga

SEQ ID NO: 3415 - DNA, 36 bp, Artificial Sequence
  Synthetic oligonucleotide
atttcttgccgttgccctgtttttttgtttatgaaa

SEQ ID NO: 3416 - DNA, 38 bp, Artificial Sequence
  Synthetic oligonucleotide
ttatgcaattttcttccgcttggaccataacaggttga

SEQ ID NO: 3417 - DNA, 38 bp, Artificial Sequence
  Synthetic oligonucleotide
tctttggtccgtgtaaataattttgcctgcttttttga

SEQ ID NO: 3418 - DNA, 35 bp, Artificial Sequence
  Synthetic oligonucleotide
aacgcgtactgagcaataaagcttttgccgtgttt

SEQ ID NO: 3419 - DNA, 38 bp, Artificial Sequence
  Synthetic oligonucleotide
agtgagtcgacgacgacgtttctcgatatcccccttga

SEQ ID NO: 3420 - DNA, 37 bp, Artificial Sequence
  Synthetic oligonucleotide
tttgttccattttttatgcattgttttcagtacgtga

SEQ ID NO: 3421 - DNA, 38 bp, Artificial Sequence
  Synthetic oligonucleotide
ttttagctctcatttggttgaggattattctgctttga

SEQ ID NO: 3422 - DNA, 37 bp, Artificial Sequence
  Synthetic oligonucleotide
ttccttagggggtttgacctcatggtccttcgtgtga

SEQ ID NO: 3423 - DNA, 38 bp, Artificial Sequence
  Synthetic oligonucleotide
ttacaatgattttcgaaccgggggttcgagctatttga

SEQ ID NO: 3424 - DNA, 35 bp, Artificial Sequence
  Synthetic oligonucleotide
gttcgcttggccgtggacttcctatattaaatttg

SEQ ID NO: 3425 - DNA, 35 bp, Artificial Sequence
  Synthetic oligonucleotide
gcccttttgctttttgagggatttaacatgcttgg

SEQ ID NO: 3426 - DNA, 35 bp, Artificial Sequence
  Synthetic oligonucleotide
ggaaatagaattgtaggattctctagtgcttttct

SEQ ID NO: 3427 - DNA, 36 bp, Artificial Sequence
  Synthetic oligonucleotide
gaccgtgttcggaccggatgtccgacttcttcttga

SEQ ID NO: 3428 - DNA, 38 bp, Artificial Sequence
  Synthetic oligonucleotide
gagtaatcgtaaattttgccccgctggctctggcttga

SEQ ID NO: 3429 - DNA, 35 bp, Artificial Sequence
  Synthetic oligonucleotide
ttactccttgacgattgtgagttctctttagaagc

SEQ ID NO: 3430 - DNA, 38 bp, Artificial Sequence
  Synthetic oligonucleotide
gcacgggaaggtactgctcgtcatattaacttggttga

SEQ ID NO: 3431 - DNA, 37 bp, Artificial Sequence
  Synthetic oligonucleotide
tccgtagatccgccccaagcatgggtttttagtttga

SEQ ID NO: 3432 - DNA, 36 bp, Artificial Sequence
  Synthetic oligonucleotide
ttctatgcaaagctccaacggtggagtggttttcta

SEQ ID NO: 3433 - DNA, 38 bp, Artificial Sequence
  Synthetic oligonucleotide
tctttatctagcttggtgggctatgcaagcccatttga

SEQ ID NO: 3434 - DNA, 38 bp, Artificial Sequence
  Synthetic oligonucleotide
atcccgttttttacctttgtgagcattatgccgcttga

SEQ ID NO: 3435 - DNA, 37 bp, Artificial Sequence
  Synthetic oligonucleotide
gttttcgcgagttatttccgtaatctgctcttagtga

SEQ ID NO: 3436 - DNA, 35 bp, Artificial Sequence
  Synthetic oligonucleotide
aaattaaacctttgcgcgttttggtgccctttgaa

SEQ ID NO: 3437 - DNA, 36 bp, Artificial Sequence
  Synthetic oligonucleotide
ttttgccgttttccatttatccgtgtaaatgattca

SEQ ID NO: 3438 - DNA, 36 bp, Artificial Sequence
  Synthetic oligonucleotide
gtggtaccatttgactccaacggtgattattgctta

SEQ ID NO: 3439 - DNA, 38 bp, Artificial Sequence
  Synthetic oligonucleotide
gcggtcgttttgacttgtcttcggtctcattggattga

SEQ ID NO: 3440 - DNA, 36 bp, Artificial Sequence
  Synthetic oligonucleotide
gagtggaacgttagctttactttggtgggatcttga

SEQ ID NO: 3441 - DNA, 37 bp, Artificial Sequence
  Synthetic oligonucleotide
acggttcgcactgttcaacgtggtttctccttgggga

SEQ ID NO: 3442 - DNA, 35 bp, Artificial Sequence
  Synthetic oligonucleotide
attgctgtgcctgactatttgaacctttgaccgta

SEQ ID NO: 3443 - DNA, 36 bp, Artificial Sequence
  Synthetic oligonucleotide
attgtttttatttttgccatagggtgtgccttagta

SEQ ID NO: 3444 - DNA, 37 bp, Artificial Sequence
  Synthetic oligonucleotide
acgtcaaccatatgattagctttgttgcccttggaga

SEQ ID NO: 3445 - DNA, 38 bp, Artificial Sequence
  Synthetic oligonucleotide
atttcaaattgctttgctggacggtgctccttacttga

SEQ ID NO: 3446 - DNA, 35 bp, Artificial Sequence
  Synthetic oligonucleotide
tttgcatgaagccattgaccggattggattcttta

SEQ ID NO: 3447 - DNA, 38 bp, Artificial Sequence
  Synthetic oligonucleotide
tcctggagcttctacgtaaatttgatgccttttgatga

SEQ ID NO: 3448 - DNA, 37 bp, Artificial Sequence
  Synthetic oligonucleotide
acagaggtacgttgattctcctcccttgttagcccta

SEQ ID NO: 3449 - DNA, 38 bp, Artificial Sequence
  Synthetic oligonucleotide
attgcatggggattctgcctatgttggttctgttttga

SEQ ID NO: 3450 - DNA, 35 bp, Artificial Sequence
  Synthetic oligonucleotide
gccacgtattcatcacatggggggatgtccttgtt

SEQ ID NO: 3451 - DNA, 36 bp, Artificial Sequence
  Synthetic oligonucleotide
aatgcatcgatgagccattgacttgtttggtttgta

SEQ ID NO: 3452 - DNA, 35 bp, Artificial Sequence
  Synthetic oligonucleotide
attttgatcacatgtgttgtgtaccatttgctatt

SEQ ID NO: 3453 - DNA, 35 bp, Artificial Sequence
  Synthetic oligonucleotide
tgtttgttgcccgctcggcgcagttaccctttgct

SEQ ID NO: 3454 - DNA, 38 bp, Artificial Sequence
  Synthetic oligonucleotide
tgccacccgtgtttggggccctagtgtttttttcgtga

SEQ ID NO: 3455 - DNA, 38 bp, Artificial Sequence
  Synthetic oligonucleotide
cgtcagtaattgcagcatgacaatttcctgcttgttga

SEQ ID NO: 3456 - DNA, 38 bp, Artificial Sequence
  Synthetic oligonucleotide
tgttccctgattttgccactggacctagtaggatttga

SEQ ID NO: 3457 - DNA, 35 bp, Artificial Sequence
  Synthetic oligonucleotide
catgccgaaacgatggtttggatcgtgctcctctg

SEQ ID NO: 3458 - DNA, 38 bp, Artificial Sequence
  Synthetic oligonucleotide
ttcgctatccgggtgatcgctgtggaggtatttcttga

SEQ ID NO: 3459 - DNA, 38 bp, Artificial Sequence
  Synthetic oligonucleotide
tctaattttttgcgtggttctggcctatcaaagtttga

SEQ ID NO: 3460 - DNA, 38 bp, Artificial Sequence
  Synthetic oligonucleotide
gcttccttctgggtgacgggtgatccccgtgcttgtga

SEQ ID NO: 3461 - DNA, 36 bp, Artificial Sequence
  Synthetic oligonucleotide
gagtacactcaattttagtttggtgcatgccctgca

SEQ ID NO: 3462 - DNA, 37 bp, Artificial Sequence
  Synthetic oligonucleotide
ttgctctgttcttaccgcccagtgaacgcgtgttcga

SEQ ID NO: 3463 - DNA, 38 bp, Artificial Sequence
  Synthetic oligonucleotide
acgtgcacaatgttggattgtttttgccctttgtatga

SEQ ID NO: 3464 - DNA, 37 bp, Artificial Sequence
  Synthetic oligonucleotide
tatttgcccgattgtgaaggtgtagcccttgatctga

SEQ ID NO: 3465 - DNA, 38 bp, Artificial Sequence
  Synthetic oligonucleotide
tcgacttgccagggacttttgcatccgccttgatatga

SEQ ID NO: 3466 - DNA, 35 bp, Artificial Sequence
  Synthetic oligonucleotide
gcagggccgcctgttaaggttcctaatttgccgtt

SEQ ID NO: 3467 - DNA, 37 bp, Artificial Sequence
  Synthetic oligonucleotide
ccgttggtgggacacccctgatcttgcctcttattga

SEQ ID NO: 3468 - DNA, 35 bp, Artificial Sequence
  Synthetic oligonucleotide
acccgatagctttgaggtttgtttttctgtgcctt

SEQ ID NO: 3469 - DNA, 36 bp, Artificial Sequence
  Synthetic oligonucleotide
tctagcgtttgcttaccgcacactttctgtgaaaaa

SEQ ID NO: 3470 - DNA, 38 bp, Artificial Sequence
  Synthetic oligonucleotide
gagctttagaggcgcttgagggcgactttcctgtttga

SEQ ID NO: 3471 - DNA, 35 bp, Artificial Sequence
  Synthetic oligonucleotide
aatagaatgatttgtccggtcccgtatttcttgct

SEQ ID NO: 3472 - DNA, 37 bp, Artificial Sequence
  Synthetic oligonucleotide
ttcgtaacgttgaccgtgttgtttcgtttatgcctga

SEQ ID NO: 3473 - DNA, 38 bp, Artificial Sequence
  Synthetic oligonucleotide
agacccgtgaggatacatttttgtttaatttggcttga

SEQ ID NO: 3474 - DNA, 37 bp, Artificial Sequence
  Synthetic oligonucleotide
ttaacgcccaagctcggggaccgtgttctgtttttga

SEQ ID NO: 3475 - DNA, 38 bp, Artificial Sequence
  Synthetic oligonucleotide
gcatggttttgttcgaatatttccgaatcacgatttga

SEQ ID NO: 3476 - DNA, 37 bp, Artificial Sequence
  Synthetic oligonucleotide
ttgcaaatggaacctatgccctgttttaatgacttga

SEQ ID NO: 3477 - DNA, 37 bp, Artificial Sequence
  Synthetic oligonucleotide
attttatcggttttgtacctgatttgctttgattgga

SEQ ID NO: 3478 - DNA, 35 bp, Artificial Sequence
  Synthetic oligonucleotide
agtggacgcgttacctcacttttgcttgaatttgc

SEQ ID NO: 3479 - DNA, 35 bp, Artificial Sequence
  Synthetic oligonucleotide
atgtttgttgttgttcctccccttatgacttaatc

SEQ ID NO: 3480 - DNA, 38 bp, Artificial Sequence
  Synthetic oligonucleotide
tttgcctgtgaggtaaatctcatagtatccgtttttga

SEQ ID NO: 3481 - DNA, 35 bp, Artificial Sequence
  Synthetic oligonucleotide
ttttgcttcgtgtggtggttaactttcgcgcttac

SEQ ID NO: 3482 - DNA, 35 bp, Artificial Sequence
  Synthetic oligonucleotide
tgatcaatctggtccctcttttttggagtcttcac

SEQ ID NO: 3483 - DNA, 37 bp, Artificial Sequence
  Synthetic oligonucleotide
ttagcattcgccttccaaacccacgggtttgccttga

SEQ ID NO: 3484 - DNA, 37 bp, Artificial Sequence
  Synthetic oligonucleotide
acacggttgtccctggattagctctttgatttggtga

SEQ ID NO: 3485 - DNA, 37 bp, Artificial Sequence
  Synthetic oligonucleotide
ttcactcgaggtttcggttttataaatttctgtacga

SEQ ID NO: 3486 - DNA, 38 bp, Artificial Sequence
  Synthetic oligonucleotide
cccaacttggtttctgtttatgatctattcggtgatga

SEQ ID NO: 3487 - DNA, 36 bp, Artificial Sequence
  Synthetic oligonucleotide
attgcccttgtttggtgtgtgtatttttctcatgta

SEQ ID NO: 3488 - DNA, 37 bp, Artificial Sequence
  Synthetic oligonucleotide
actttctgggtttacttctggtggtttccatgtatga

SEQ ID NO: 3489 - DNA, 35 bp, Artificial Sequence
  Synthetic oligonucleotide
ttttgaccctgcgaaccgaatgaccgtaatcgtta

SEQ ID NO: 3490 - DNA, 38 bp, Artificial Sequence
  Synthetic oligonucleotide
gattcttcaactcgggttgacacctgttcgccttttga

SEQ ID NO: 3491 - DNA, 38 bp, Artificial Sequence
  Synthetic oligonucleotide
ggtggtcctttgttgacggaatttatttggttctctga

SEQ ID NO: 3492 - DNA, 37 bp, Artificial Sequence
  Synthetic oligonucleotide
tatttcttccgtgttttccatactgtgatgatggaga

SEQ ID NO: 3493 - DNA, 35 bp, Artificial Sequence
  Synthetic oligonucleotide
tttggctctttagcacacgggtttctagttccgtt

SEQ ID NO: 3494 - DNA, 38 bp, Artificial Sequence
  Synthetic oligonucleotide
ggaagtactgtactccgaatcggatcggatttttttga

SEQ ID NO: 3495 - DNA, 35 bp, Artificial Sequence
  Synthetic oligonucleotide
aataggaacttgccctcgcttttaattgttgcctt

SEQ ID NO: 3496 - DNA, 38 bp, Artificial Sequence
  Synthetic oligonucleotide
ttttctgacttttggggtggtctaaatatacttggtga

SEQ ID NO: 3497 - DNA, 35 bp, Artificial Sequence
  Synthetic oligonucleotide
aatttgcctcgtttttccgggtcctgaagggatct

SEQ ID NO: 3498 - DNA, 35 bp, Artificial Sequence
  Synthetic oligonucleotide
tcgacttaatgtcttattcggagccctacttgaaa

SEQ ID NO: 3499 - DNA, 38 bp, Artificial Sequence
  Synthetic oligonucleotide
gccgctaacgctgaaccgacgttgttaaatccgtgtga

SEQ ID NO: 3500 - DNA, 38 bp, Artificial Sequence
  Synthetic oligonucleotide
ttccttgatggggttcgcctttttctgccaactattga

SEQ ID NO: 3501 - DNA, 35 bp, Artificial Sequence
  Synthetic oligonucleotide
gcaccgaagagtacgtttcgaccttggattattgc

SEQ ID NO: 3502 - DNA, 35 bp, Artificial Sequence
  Synthetic oligonucleotide
tactgtcctattccccgtagttttttgtacctgga

SEQ ID NO: 3503 - DNA, 38 bp, Artificial Sequence
  Synthetic oligonucleotide
ttgcgaacttggttagcccgcctagagggttgatttga

SEQ ID NO: 3504 - DNA, 36 bp, Artificial Sequence
  Synthetic oligonucleotide
gaatgtcaccttgtggtagtgggtttctggttttga

SEQ ID NO: 3505 - DNA, 37 bp, Artificial Sequence
  Synthetic oligonucleotide
tgaaccacttagatccgttccttaaccctgcttatga

SEQ ID NO: 3506 - DNA, 35 bp, Artificial Sequence
  Synthetic oligonucleotide
ttaatcccctttcttctcgcttatgaagaaactta

SEQ ID NO: 3507 - DNA, 37 bp, Artificial Sequence
  Synthetic oligonucleotide
gagtgcgggttgatcacttggtggggtatcttcttga

SEQ ID NO: 3508 - DNA, 35 bp, Artificial Sequence
  Synthetic oligonucleotide
tcaacacgctgaccatatgttacttgtgccctgct

SEQ ID NO: 3509 - DNA, 36 bp, Artificial Sequence
  Synthetic oligonucleotide
aattctctcagtttcgctcgtagcgagtttttgcca

SEQ ID NO: 3510 - DNA, 38 bp, Artificial Sequence
  Synthetic oligonucleotide
aagttctttgccctttctttgctacctgaataatatga

SEQ ID NO: 3511 - DNA, 38 bp, Artificial Sequence
  Synthetic oligonucleotide
tgcagtatggacacagtgggtattttgttgtttggtga

SEQ ID NO: 3512 - DNA, 38 bp, Artificial Sequence
  Synthetic oligonucleotide
ttggagctgtactcccgctttatatctgtatctcgtga

SEQ ID NO: 3513 - DNA, 35 bp, Artificial Sequence
  Synthetic oligonucleotide
actttaacgaaactttgccgtatttcgtttgattc

SEQ ID NO: 3514 - DNA, 38 bp, Artificial Sequence
  Synthetic oligonucleotide
acattgtaaatcccaattctgatggtttgtttgtttga

SEQ ID NO: 3515 - DNA, 38 bp, Artificial Sequence
  Synthetic oligonucleotide
atccggtttgatcttcggagatgatatgaaatttgtga

SEQ ID NO: 3516 - DNA, 35 bp, Artificial Sequence
  Synthetic oligonucleotide
acggcgtgagccatggaaaagtaaattttgcccga

SEQ ID NO: 3517 - DNA, 35 bp, Artificial Sequence
  Synthetic oligonucleotide
atccaaaacataacctttgccgggggtattctctt

SEQ ID NO: 3518 - DNA, 38 bp, Artificial Sequence
  Synthetic oligonucleotide
ttgctcggtcaaatattgttcgttgtttcaacccgtga

SEQ ID NO: 3519 - DNA, 38 bp, Artificial Sequence
  Synthetic oligonucleotide
attgcatatccgttttctcaactgtaccgcttgggtga

SEQ ID NO: 3520 - DNA, 35 bp, Artificial Sequence
  Synthetic oligonucleotide
acctggaccggtgtcgaaccggaaatctgccctct

SEQ ID NO: 3521 - DNA, 38 bp, Artificial Sequence
  Synthetic oligonucleotide
catgcagtgggtaactaaacgcttctgtatactggtga

SEQ ID NO: 3522 - DNA, 35 bp, Artificial Sequence
  Synthetic oligonucleotide
tcatgaagcttggcttctgaaatccacacgatttt

SEQ ID NO: 3523 - DNA, 35 bp, Artificial Sequence
  Synthetic oligonucleotide
gcacccggttttgtttaactgcttgtaggaccacc

SEQ ID NO: 3524 - DNA, 35 bp, Artificial Sequence
  Synthetic oligonucleotide
ttttcgccgtgaggaataccgttgggtcctttgtt

SEQ ID NO: 3525 - DNA, 38 bp, Artificial Sequence
  Synthetic oligonucleotide
tcgttaaattgggcttgcctgtgccttttttcccgtga

SEQ ID NO: 3526 - DNA, 38 bp, Artificial Sequence
  Synthetic oligonucleotide
attgggggtcaccttgggtttggatgttttttgtttga

SEQ ID NO: 3527 - DNA, 37 bp, Artificial Sequence
  Synthetic oligonucleotide
ttgacgaaattacccggtattgtgcttataaattgga

SEQ ID NO: 3528 - DNA, 37 bp, Artificial Sequence
  Synthetic oligonucleotide
tgcgattgattccttccgtgccgttttgaaactatga

SEQ ID NO: 3529 - DNA, 36 bp, Artificial Sequence
  Synthetic oligonucleotide
tctgtgccaataactctaaatgccgcttagtttgaa

SEQ ID NO: 3530 - DNA, 38 bp, Artificial Sequence
  Synthetic oligonucleotide
atggtgatcggtggtttgttactctgtccgtttcttga

SEQ ID NO: 3531 - DNA, 35 bp, Artificial Sequence
  Synthetic oligonucleotide
gcccggttacgtaccttggggtgtttgtctcttgc

SEQ ID NO: 3532 - DNA, 35 bp, Artificial Sequence
  Synthetic oligonucleotide
tgcgagtcctctgaatctgatcctaaacttcttgc

SEQ ID NO: 3533 - DNA, 38 bp, Artificial Sequence
  Synthetic oligonucleotide
actccggccttcttctgtatcggtttttttgctgttga

SEQ ID NO: 3534 - DNA, 35 bp, Artificial Sequence
  Synthetic oligonucleotide
tcgactcttgtgccatggtttccttatctggtatt

SEQ ID NO: 3535 - DNA, 36 bp, Artificial Sequence
  Synthetic oligonucleotide
ttcgatctgtgcgaacagattttgttttgccctgga

SEQ ID NO: 3536 - DNA, 35 bp, Artificial Sequence
  Synthetic oligonucleotide
ttcgtcgtttaaacacatttgtccgctatgcctta

SEQ ID NO: 3537 - DNA, 37 bp, Artificial Sequence
  Synthetic oligonucleotide
atggaaggggttccatttcctttatttgggttttcga

SEQ ID NO: 3538 - DNA, 37 bp, Artificial Sequence
  Synthetic oligonucleotide
tgcttgggtgcaatgcgaacgcatattaatttgttga

SEQ ID NO: 3539 - DNA, 35 bp, Artificial Sequence
  Synthetic oligonucleotide
gcattgtgtaacttcggtttttttggaattttcgc

SEQ ID NO: 3540 - DNA, 36 bp, Artificial Sequence
  Synthetic oligonucleotide
gggtccaaacggcttggccattttctctatttctga

SEQ ID NO: 3541 - DNA, 38 bp, Artificial Sequence
  Synthetic oligonucleotide
gataatcttgctccgtagaaacatacttactctggtga

SEQ ID NO: 3542 - DNA, 35 bp, Artificial Sequence
  Synthetic oligonucleotide
atcgagtgtctcccgttttatctttgattgtttgc

SEQ ID NO: 3543 - DNA, 36 bp, Artificial Sequence
  Synthetic oligonucleotide
tctctgtattcgtttttctgatatttggttgtagaa

SEQ ID NO: 3544 - DNA, 36 bp, Artificial Sequence
  Synthetic oligonucleotide
tctcctgggtcccgttcggttatattatgcttgtga

SEQ ID NO: 3545 - DNA, 38 bp, Artificial Sequence
  Synthetic oligonucleotide
accgctcccttttgttcgggcttggccaatttccttga

SEQ ID NO: 3546 - DNA, 35 bp, Artificial Sequence
  Synthetic oligonucleotide
aggccaattttatagcggtgactcacttttgccct

SEQ ID NO: 3547 - DNA, 38 bp, Artificial Sequence
  Synthetic oligonucleotide
gggtgaggtaccttctccgtgtgattctccgtttttga

SEQ ID NO: 3548 - DNA, 38 bp, Artificial Sequence
  Synthetic oligonucleotide
gaaacgtgattataccgacttgttgcttacgaatttga

SEQ ID NO: 3549 - DNA, 36 bp, Artificial Sequence
  Synthetic oligonucleotide
ttgcctgagagatgccgctttgttcttcgtaatcta

SEQ ID NO: 3550 - DNA, 38 bp, Artificial Sequence
  Synthetic oligonucleotide
ttctctgacccggtttttttacatatgtgacgttttga

SEQ ID NO: 3551 - DNA, 38 bp, Artificial Sequence
  Synthetic oligonucleotide
tgcacctcgtaaaaaaactcgggtctggaatttcgtga

SEQ ID NO: 3552 - DNA, 38 bp, Artificial Sequence
  Synthetic oligonucleotide
cataaactctccttcctgcactcttccggattacttga

SEQ ID NO: 3553 - DNA, 35 bp, Artificial Sequence
  Synthetic oligonucleotide
acccgggtttgcatactgttcttctgtccttatga

SEQ ID NO: 3554 - DNA, 38 bp, Artificial Sequence
  Synthetic oligonucleotide
tctgaaactagcatgagccttactgacctgatgtttga

SEQ ID NO: 3555 - DNA, 35 bp, Artificial Sequence
  Synthetic oligonucleotide
tattgcccgccactttctgaatgatttgatctgct

SEQ ID NO: 3556 - DNA, 37 bp, Artificial Sequence
  Synthetic oligonucleotide
gacgcaccaaattatgcaatacaaattctgcccttga

SEQ ID NO: 3557 - DNA, 35 bp, Artificial Sequence
  Synthetic oligonucleotide
gggttacgttattctccggtaccttgggtttaaaa

SEQ ID NO: 3558 - DNA, 35 bp, Artificial Sequence
  Synthetic oligonucleotide
gacaactcccgtgaggagtttctgattttatgttt

SEQ ID NO: 3559 - DNA, 38 bp, Artificial Sequence
  Synthetic oligonucleotide
ttactagccggtggatctgcccacgttcgtttttttga

SEQ ID NO: 3560 - DNA, 38 bp, Artificial Sequence
  Synthetic oligonucleotide
gcacaaattgcccggtataattgttatacgctatgtga

SEQ ID NO: 3561 - DNA, 37 bp, Artificial Sequence
  Synthetic oligonucleotide
taccgaggtcgagggatttttgtttgtccttatgtga

SEQ ID NO: 3562 - DNA, 36 bp, Artificial Sequence
  Synthetic oligonucleotide
aaaattgccggcgccgtagccttgttttcatcttta

SEQ ID NO: 3563 - DNA, 38 bp, Artificial Sequence
  Synthetic oligonucleotide
tccgcgggccgtaatttggttagattttctgtttgtga

SEQ ID NO: 3564 - DNA, 37 bp, Artificial Sequence
  Synthetic oligonucleotide
ttgcctcgctttgaccagtgttcctgtttctccttga

SEQ ID NO: 3565 - DNA, 38 bp, Artificial Sequence
  Synthetic oligonucleotide
gggcggaccgcctggggttttgaaccttacaatcttga

SEQ ID NO: 3566 - DNA, 38 bp, Artificial Sequence
  Synthetic oligonucleotide
gagtacgtgaccggtgaaaaatattgggatgtgtgtga

SEQ ID NO: 3567 - DNA, 37 bp, Artificial Sequence
  Synthetic oligonucleotide
tttgcgcgtgagcgttataaaattttccgactaccga

SEQ ID NO: 3568 - DNA, 38 bp, Artificial Sequence
  Synthetic oligonucleotide
ggtcgccttgccacaccgataatcgttgaattttgtga

SEQ ID NO: 3569 - DNA, 35 bp, Artificial Sequence
  Synthetic oligonucleotide
tgccgctggacactatatatggtttctgaaatgcc

SEQ ID NO: 3570 - DNA, 38 bp, Artificial Sequence
  Synthetic oligonucleotide
gagaacgcacaagttgccacgaggtttatttgccttga

SEQ ID NO: 3571 - DNA, 37 bp, Artificial Sequence
  Synthetic oligonucleotide
tgccctgtaaaacctcggacggtttcctgtttgttga

SEQ ID NO: 3572 - DNA, 35 bp, Artificial Sequence
  Synthetic oligonucleotide
tccatctaagattatctcgtatcacactattaaat

SEQ ID NO: 3573 - DNA, 37 bp, Artificial Sequence
  Synthetic oligonucleotide
tatcaacccaaactaaccgctcaataatgaattaaga

SEQ ID NO: 3574 - DNA, 36 bp, Artificial Sequence
  Synthetic oligonucleotide
agtcagtactaaactctctaaacatctggatccaaa

SEQ ID NO: 3575 - DNA, 36 bp, Artificial Sequence
  Synthetic oligonucleotide
ttcgcaagtccaggatcgcgactaaataccttacaa

SEQ ID NO: 3576 - DNA, 36 bp, Artificial Sequence
  Synthetic oligonucleotide
tgcctcatcccgaatagttttgtcaacccatccaca

SEQ ID NO: 3577 - DNA, 37 bp, Artificial Sequence
  Synthetic oligonucleotide
acactctaccaaatagccactcgcaaacatataaaga

SEQ ID NO: 3578 - DNA, 36 bp, Artificial Sequence
  Synthetic oligonucleotide
tcgtcactcactcaatatccttggtacctactcaaa

SEQ ID NO: 3579 - DNA, 36 bp, Artificial Sequence
  Synthetic oligonucleotide
tgcaggcccctgtgaacacctttattgaatagcaca

SEQ ID NO: 3580 - DNA, 35 bp, Artificial Sequence
  Synthetic oligonucleotide
gcactgtgacctaccactttgacctctgtttaaac

SEQ ID NO: 3581 - DNA, 36 bp, Artificial Sequence
  Synthetic oligonucleotide
acctcgaccatctacaaactttgaagccacaccaaa

SEQ ID NO: 3582 - DNA, 36 bp, Artificial Sequence
  Synthetic oligonucleotide
taagcctgactccatcgtctattattttttttaagc

SEQ ID NO: 3583 - DNA, 35 bp, Artificial Sequence
  Synthetic oligonucleotide
atcgccacgaccaaccaccacggatcccacataaa

SEQ ID NO: 3584 - DNA, 36 bp, Artificial Sequence
  Synthetic oligonucleotide
tactcgacgaaatagctaacaacggacccgataaaa

SEQ ID NO: 3585 - DNA, 37 bp, Artificial Sequence
  Synthetic oligonucleotide
aaatcatccgtagtttatcctttgtctccatccaaga

SEQ ID NO: 3586 - DNA, 35 bp, Artificial Sequence
  Synthetic oligonucleotide
gggaacgtaactcaggtttttttcatcccaacaca

SEQ ID NO: 3587 - DNA, 38 bp, Artificial Sequence
  Synthetic oligonucleotide
aactcggccacccgtagacgtatatccaattcacttga

SEQ ID NO: 3588 - DNA, 37 bp, Artificial Sequence
  Synthetic oligonucleotide
ctgcagcttgatcttcgtcacaacacatctattacga

SEQ ID NO: 3589 - DNA, 38 bp, Artificial Sequence
  Synthetic oligonucleotide
ccttccaatctgcatcgctaacgcatacaccattatga

SEQ ID NO: 3590 - DNA, 38 bp, Artificial Sequence
  Synthetic oligonucleotide
gatctattcaccttagccataattatagaccccaatga

SEQ ID NO: 3591 - DNA, 35 bp, Artificial Sequence
  Synthetic oligonucleotide
ccgtactgtttacacatatctatccacgtattaca

SEQ ID NO: 3592 - DNA, 35 bp, Artificial Sequence
  Synthetic oligonucleotide
acgtctgccaaatctactcgcattcgatacacacc

SEQ ID NO: 3593 - DNA, 35 bp, Artificial Sequence
  Synthetic oligonucleotide
ctgtcgacattccgctataaaattaccaacccaat

SEQ ID NO: 3594 - DNA, 36 bp, Artificial Sequence
  Synthetic oligonucleotide
gagtacgcaattattatccgaagtcaactatagcaa

SEQ ID NO: 3595 - DNA, 36 bp, Artificial Sequence
  Synthetic oligonucleotide
gagtaactagtcatcaattctatcttcgcacactaa

SEQ ID NO: 3596 - DNA, 35 bp, Artificial Sequence
  Synthetic oligonucleotide
atgcgctactgcctagctcccgctcgcccatataa

SEQ ID NO: 3597 - DNA, 36 bp, Artificial Sequence
  Synthetic oligonucleotide
acaatatcgatctccaaaactatctcgtgtatctca

SEQ ID NO: 3598 - DNA, 38 bp, Artificial Sequence
  Synthetic oligonucleotide
acgtacccgaccccggcgttaagccgtctttgtactga

SEQ ID NO: 3599 - DNA, 35 bp, Artificial Sequence
  Synthetic oligonucleotide
gtcactcattatatggttctacactacgatcatca

SEQ ID NO: 3600 - DNA, 36 bp, Artificial Sequence
  Synthetic oligonucleotide
gactccgtcgttcatttcactaacacgtatgccaga

SEQ ID NO: 3601 - DNA, 36 bp, Artificial Sequence
  Synthetic oligonucleotide
tagtacccacttattactatcggagttcaaacataa

SEQ ID NO: 3602 - DNA, 36 bp, Artificial Sequence
  Synthetic oligonucleotide
tcgagcgcacagattcgttttccaccgcgaacttca

SEQ ID NO: 3603 - DNA, 37 bp, Artificial Sequence
  Synthetic oligonucleotide
gccacgtttcctactttcgttcgttcgccacgtagga

SEQ ID NO: 3604 - DNA, 35 bp, Artificial Sequence
  Synthetic oligonucleotide
tcactgacccacctctcgatccccaattaaatatt

SEQ ID NO: 3605 - DNA, 36 bp, Artificial Sequence
  Synthetic oligonucleotide
cgcttcccgaatcgagagatcaagcgatcagccgta

SEQ ID NO: 3606 - DNA, 37 bp, Artificial Sequence
  Synthetic oligonucleotide
tcttacgtacgcttcgtagacaattattcatttctga

SEQ ID NO: 3607 - DNA, 38 bp, Artificial Sequence
  Synthetic oligonucleotide
tgctacacgaaacctgtactgctagctatctatcatga

SEQ ID NO: 3608 - DNA, 36 bp, Artificial Sequence
  Synthetic oligonucleotide
ctagctcttcagtcgcactcctagtctcaccattca

SEQ ID NO: 3609 - DNA, 35 bp, Artificial Sequence
  Synthetic oligonucleotide
tgaccattagttaactctatcttttgaaataatct

SEQ ID NO: 3610 - DNA, 36 bp, Artificial Sequence
  Synthetic oligonucleotide
agcctcataggcattccggtgtcacgcaaacacata

SEQ ID NO: 3611 - DNA, 38 bp, Artificial Sequence
  Synthetic oligonucleotide
tgccgtcccgggactcaatccacgtttttattttctca

SEQ ID NO: 3612 - DNA, 38 bp, Artificial Sequence
  Synthetic oligonucleotide
tgccgctaaggcagttactacagggtcttattacatga

SEQ ID NO: 3613 - DNA, 35 bp, Artificial Sequence
  Synthetic oligonucleotide
gaccccttgttaaatgtatccttgttaattacgat

SEQ ID NO: 3614 - DNA, 36 bp, Artificial Sequence
  Synthetic oligonucleotide
caaccgtcctctaatttcacgcctgtcggtcattca

SEQ ID NO: 3615 - DNA, 38 bp, Artificial Sequence
  Synthetic oligonucleotide
ctacaccactattcaaaacgaatatctcatcatactga

SEQ ID NO: 3616 - DNA, 36 bp, Artificial Sequence
  Synthetic oligonucleotide
ttgtacctgcactgcctcaagttattacatctcata

SEQ ID NO: 3617 - DNA, 38 bp, Artificial Sequence
  Synthetic oligonucleotide
taggcgagagcctttgacaggttaccaggtggtggtga

SEQ ID NO: 3618 - DNA, 37 bp, Artificial Sequence
  Synthetic oligonucleotide
agtgactgcgcaaatcactacaacttccatccaaaga

SEQ ID NO: 3619 - DNA, 37 bp, Artificial Sequence
  Synthetic oligonucleotide
gagtgactgctttgacctatacacacaaccaacttaa

SEQ ID NO: 3620 - DNA, 36 bp, Artificial Sequence
  Synthetic oligonucleotide
atttaaccctaaatatttcaacacacaaacaccaca

SEQ ID NO: 3621 - DNA, 38 bp, Artificial Sequence
  Synthetic oligonucleotide
ctctggactgcaacacagtgccgttccgaccttcttga

SEQ ID NO: 3622 - DNA, 36 bp, Artificial Sequence
  Synthetic oligonucleotide
tacttagtcttcttcggatcgcgaccgtggtcggta

SEQ ID NO: 3623 - DNA, 35 bp, Artificial Sequence
  Synthetic oligonucleotide
atatcgtacctattttctaatcttacgctgttcac

SEQ ID NO: 3624 - DNA, 38 bp, Artificial Sequence
  Synthetic oligonucleotide
cccccgcaccacattattccgatcatattatccattga

SEQ ID NO: 3625 - DNA, 35 bp, Artificial Sequence
  Synthetic oligonucleotide
acttaatattccattctcaattacactattcggtt

SEQ ID NO: 3626 - DNA, 38 bp, Artificial Sequence
  Synthetic oligonucleotide
ttcgtcactgctacttttatattaagcccatagaatga

SEQ ID NO: 3627 - DNA, 36 bp, Artificial Sequence
  Synthetic oligonucleotide
cctcgcatccgacttttacaatcacataatcacgta

SEQ ID NO: 3628 - DNA, 36 bp, Artificial Sequence
  Synthetic oligonucleotide
ttgaaagcccctcaatggccacctattttgcattca

SEQ ID NO: 3629 - DNA, 36 bp, Artificial Sequence
  Synthetic oligonucleotide
gagtactgtctctattccacaagcataactacttca

SEQ ID NO: 3630 - DNA, 38 bp, Artificial Sequence
  Synthetic oligonucleotide
aggcgactgccgcagtgccgctgtccgtttcatcatga

SEQ ID NO: 3631 - DNA, 38 bp, Artificial Sequence
  Synthetic oligonucleotide
aatgccaagtcttatcgctagcaataatattgaactga

SEQ ID NO: 3632 - DNA, 36 bp, Artificial Sequence
  Synthetic oligonucleotide
atcccctgtctgcatgcaggcctatgaccgcactca

SEQ ID NO: 3633 - DNA, 37 bp, Artificial Sequence
  Synthetic oligonucleotide
gggggcgggagctacgcaagcatgcctttgacattga

SEQ ID NO: 3634 - DNA, 38 bp, Artificial Sequence
  Synthetic oligonucleotide
taatttctctgcatctatctcaaagcaccactatctta

SEQ ID NO: 3635 - DNA, 36 bp, Artificial Sequence
  Synthetic oligonucleotide
acccatctaccgcattattaacgttataaccctaaa

SEQ ID NO: 3636 - DNA, 37 bp, Artificial Sequence
  Synthetic oligonucleotide
cctgcctatcgccccttcatattctcagatcagcaga

SEQ ID NO: 3637 - DNA, 36 bp, Artificial Sequence
  Synthetic oligonucleotide
ttctcgtctcggggctaatacacatacaattataca

SEQ ID NO: 3638 - DNA, 35 bp, Artificial Sequence
  Synthetic oligonucleotide
gctcattctattttagcatatcatccatctaatcg

SEQ ID NO: 3639 - DNA, 35 bp, Artificial Sequence
  Synthetic oligonucleotide
aatccgtcatgtattaaacacttctatcacattcg

SEQ ID NO: 3640 - DNA, 37 bp, Artificial Sequence
  Synthetic oligonucleotide
actcttctgaatcgaaaccaatctcactttcagggga

SEQ ID NO: 3641 - DNA, 36 bp, Artificial Sequence
  Synthetic oligonucleotide
ctaccatcacatcctatcatcgcatttagtcttgta

SEQ ID NO: 3642 - DNA, 35 bp, Artificial Sequence
  Synthetic oligonucleotide
ctaatcatctcttcaaattcaacggcgaacaaaac

SEQ ID NO: 3643 - DNA, 38 bp, Artificial Sequence
  Synthetic oligonucleotide
taagcacttccgttttaatctttacgacgcacccatga

SEQ ID NO: 3644 - DNA, 36 bp, Artificial Sequence
  Synthetic oligonucleotide
tactatcggcacttctacggaggataccctcgatta

SEQ ID NO: 3645 - DNA, 35 bp, Artificial Sequence
  Synthetic oligonucleotide
tgagctgccgctatggtgaccttctatcccattat

SEQ ID NO: 3646 - DNA, 36 bp, Artificial Sequence
  Synthetic oligonucleotide
ccttacagacggtcaccgtcttgcgggttattacaa

SEQ ID NO: 3647 - DNA, 36 bp, Artificial Sequence
  Synthetic oligonucleotide
ccagtcagtctgttactgtcttgttcccatccctca

SEQ ID NO: 3648 - DNA, 36 bp, Artificial Sequence
  Synthetic oligonucleotide
cgtttccacacgccgattcaaatccctcattaacca

SEQ ID NO: 3649 - DNA, 35 bp, Artificial Sequence
  Synthetic oligonucleotide
acctaacatcctatcaccgcttatgtattgcatca

SEQ ID NO: 3650 - DNA, 35 bp, Artificial Sequence
  Synthetic oligonucleotide
gcagtaggttgtgatgctagctaattatactatac

SEQ ID NO: 3651 - DNA, 38 bp, Artificial Sequence
  Synthetic oligonucleotide
cccgccgcacgtccaatattcaaccatgaccttactga

SEQ ID NO: 3652 - DNA, 35 bp, Artificial Sequence
  Synthetic oligonucleotide
atcgccatcatcgctttatctggtcgtgggaaccc

SEQ ID NO: 3653 - DNA, 36 bp, Artificial Sequence
  Synthetic oligonucleotide
tgtcatccgttatttcattcaccttctactatgtaa

SEQ ID NO: 3654 - DNA, 37 bp, Artificial Sequence
  Synthetic oligonucleotide
tactattatcatccacgccatcagccgggtcttcgga

SEQ ID NO: 3655 - DNA, 38 bp, Artificial Sequence
  Synthetic oligonucleotide
ccttacatacatactccgcatacgtgcctatttaatga

SEQ ID NO: 3656 - DNA, 37 bp, Artificial Sequence
  Synthetic oligonucleotide
acaactatcaaataaacctgcgccctctattaatgga

SEQ ID NO: 3657 - DNA, 35 bp, Artificial Sequence
  Synthetic oligonucleotide
gcaccatcgccggactgctcatatccccgttgtaa

SEQ ID NO: 3658 - DNA, 37 bp, Artificial Sequence
  Synthetic oligonucleotide
ctcgcagtaatggtgcccacatgttacgtctctttga

SEQ ID NO: 3659 - DNA, 36 bp, Artificial Sequence
  Synthetic oligonucleotide
ttagtactgtcattcgaggattcgaatctagcttta

SEQ ID NO: 3660 - DNA, 36 bp, Artificial Sequence
  Synthetic oligonucleotide
tgtaaacgtacgatattacttccgatccatacatca

SEQ ID NO: 3661 - DNA, 37 bp, Artificial Sequence
  Synthetic oligonucleotide
attcaagcaatctagtaattattctttcactgccgga

SEQ ID NO: 3662 - DNA, 38 bp, Artificial Sequence
  Synthetic oligonucleotide
taccatctctattccacgtccacgacacgctgccatga

SEQ ID NO: 3663 - DNA, 36 bp, Artificial Sequence
  Synthetic oligonucleotide
tgttgacaatgccgctgtcccgtctacccttcgata

SEQ ID NO: 3664 - DNA, 35 bp, Artificial Sequence
  Synthetic oligonucleotide
catgtcgccgtcgcgcacagcctacatcccactta

SEQ ID NO: 3665 - DNA, 35 bp, Artificial Sequence
  Synthetic oligonucleotide
gagtacttctcataaacgaaatatcaaattcgaat

SEQ ID NO: 3666 - DNA, 38 bp, Artificial Sequence
  Synthetic oligonucleotide
tgactgcgaaactaacgtatccccatatatacaattga

SEQ ID NO: 3667 - DNA, 36 bp, Artificial Sequence
  Synthetic oligonucleotide
ttcagcgcgttcttcacagcggggtagcactcatca

SEQ ID NO: 3668 - DNA, 35 bp, Artificial Sequence
  Synthetic oligonucleotide
tcagtacatcattaatcaccatatcacgcattatc

SEQ ID NO: 3669 - DNA, 36 bp, Artificial Sequence
  Synthetic oligonucleotide
agtctactgcatcatctcccttactccaagtagtaa

SEQ ID NO: 3670 - DNA, 36 bp, Artificial Sequence
  Synthetic oligonucleotide
gctcatactcagcactgcgaattgccagtccttcac

SEQ ID NO: 3671 - DNA, 38 bp, Artificial Sequence
  Synthetic oligonucleotide
gctgcatctcgtcactccaggtggttggtacattgtga

SEQ ID NO: 3672 - DNA, 35 bp, Artificial Sequence
  Synthetic oligonucleotide
gttagctagaacgaacgcacgtcttctatctttta

SEQ ID NO: 3673 - DNA, 36 bp, Artificial Sequence
  Synthetic oligonucleotide
ttcgttattgccttagttacactctattataggtta

SEQ ID NO: 3674 - DNA, 37 bp, Artificial Sequence
  Synthetic oligonucleotide
tatcggacacttactacattaccgtcgcttataccga

SEQ ID NO: 3675 - DNA, 38 bp, Artificial Sequence
  Synthetic oligonucleotide
atcaacgtactcgaacgcgtccacaccccaccatctga

SEQ ID NO: 3676 - DNA, 38 bp, Artificial Sequence
  Synthetic oligonucleotide
gagctactctgaatctcattgatatctacaataaatga

SEQ ID NO: 3677 - DNA, 36 bp, Artificial Sequence
  Synthetic oligonucleotide
taataggacggcgggctcttgccgatatttcctgta

SEQ ID NO: 3678 - DNA, 35 bp, Artificial Sequence
  Synthetic oligonucleotide
catcttatacagctcagcctctattcccatacgtc

SEQ ID NO: 3679 - DNA, 36 bp, Artificial Sequence
  Synthetic oligonucleotide
ctgccggatcttgcacgcactgctattatatttcca

SEQ ID NO: 3680 - DNA, 35 bp, Artificial Sequence
  Synthetic oligonucleotide
actgcctaaggctatcgcatcaatatgaactcaac

SEQ ID NO: 3681 - DNA, 37 bp, Artificial Sequence
  Synthetic oligonucleotide
ctactgcacgacgcgagtccttatcaatatctcacga

SEQ ID NO: 3682 - DNA, 35 bp, Artificial Sequence
  Synthetic oligonucleotide
gagtacttacgtaacgagttattaatgtccaaaat

SEQ ID NO: 3683 - DNA, 36 bp, Artificial Sequence
  Synthetic oligonucleotide
aaggactcaatgccactatacgacttattccaatca

SEQ ID NO: 3684 - DNA, 35 bp, Artificial Sequence
  Synthetic oligonucleotide
cttttctagctagcatttacacttttatacacaac

SEQ ID NO: 3685 - DNA, 37 bp, Artificial Sequence
  Synthetic oligonucleotide
tcgggttctccctctcgccacctaggtttaaaacgga

SEQ ID NO: 3686 - DNA, 38 bp, Artificial Sequence
  Synthetic oligonucleotide
cgcatgcactgaacatatacacatctcgtcgctcctga

SEQ ID NO: 3687 - DNA, 36 bp, Artificial Sequence
  Synthetic oligonucleotide
ttacctctctacaccatttaccaacggctacgccga

SEQ ID NO: 3688 - DNA, 38 bp, Artificial Sequence
  Synthetic oligonucleotide
gacgtcttctttcacagcatgccgtaacagttttctga

SEQ ID NO: 3689 - DNA, 35 bp, Artificial Sequence
  Synthetic oligonucleotide
ctacagactaactagttcccgaattctgccacaac

SEQ ID NO: 3690 - DNA, 37 bp, Artificial Sequence
  Synthetic oligonucleotide
aatccacgtgcccaacataaagatctaactcacaaga

SEQ ID NO: 3691 - DNA, 36 bp, Artificial Sequence
  Synthetic oligonucleotide
tacgacgcctctgttaatccgtttttatataccaca

SEQ ID NO: 3692 - DNA, 38 bp, Artificial Sequence
  Synthetic oligonucleotide
ggcgggaatcacgccaaacctctgtcacctatcgctga

SEQ ID NO: 3693 - DNA, 38 bp, Artificial Sequence
  Synthetic oligonucleotide
cttctgccacttcatctcgtcaaggttcatttcgttga

SEQ ID NO: 3694 - DNA, 36 bp, Artificial Sequence
  Synthetic oligonucleotide
cgcacaacgtaccggtccagggaacacattttcgca

SEQ ID NO: 3695 - DNA, 38 bp, Artificial Sequence
  Synthetic oligonucleotide
ctctcaccagcacgtcccacacattttcacaaacctga

SEQ ID NO: 3696 - DNA, 38 bp, Artificial Sequence
  Synthetic oligonucleotide
tttctcgcgcggcaggcatccgttctaatataccatga

SEQ ID NO: 3697 - DNA, 36 bp, Artificial Sequence
  Synthetic oligonucleotide
accacaacttatcgcatctcattgattggactaata

SEQ ID NO: 3698 - DNA, 35 bp, Artificial Sequence
  Synthetic oligonucleotide
tcccctcagccatcgtggaacaactgcggtgtttc

SEQ ID NO: 3699 - DNA, 36 bp, Artificial Sequence
  Synthetic oligonucleotide
atacgtctgcgattatttagtggtctctcacacata

SEQ ID NO: 3700 - DNA, 36 bp, Artificial Sequence
  Synthetic oligonucleotide
cacgagtcgccacacctcagctgatgctcacctaca

SEQ ID NO: 3701 - DNA, 36 bp, Artificial Sequence
  Synthetic oligonucleotide
agctacgtaccgaatttcgttcataataggtaatga

SEQ ID NO: 3702 - DNA, 35 bp, Artificial Sequence
  Synthetic oligonucleotide
acacattcggccatgtcatcctgcacttcacgtga

SEQ ID NO: 3703 - DNA, 38 bp, Artificial Sequence
  Synthetic oligonucleotide
taaccatcgatcccaacacatgtcagcacggcacctga

SEQ ID NO: 3704 - DNA, 35 bp, Artificial Sequence
  Synthetic oligonucleotide
tacctagtccggccaccagtctcccacacattacg

SEQ ID NO: 3705 - DNA, 35 bp, Artificial Sequence
  Synthetic oligonucleotide
atgtctgcggaccatctatcggatcgccgaacctt

SEQ ID NO: 3706 - DNA, 37 bp, Artificial Sequence
  Synthetic oligonucleotide
cgcacttaccatgcgtatcctttatcggtctgaacga

SEQ ID NO: 3707 - DNA, 37 bp, Artificial Sequence
  Synthetic oligonucleotide
gagtcccggtcccccgggtccatcatctactccatga

SEQ ID NO: 3708 - DNA, 37 bp, Artificial Sequence
  Synthetic oligonucleotide
atctgctgttgtctttcccattagttatcccaatcga

SEQ ID NO: 3709 - DNA, 38 bp, Artificial Sequence
  Synthetic oligonucleotide
agccacacctaatagctcacatccggttaccgtcctga

SEQ ID NO: 3710 - DNA, 38 bp, Artificial Sequence
  Synthetic oligonucleotide
ccggctcagagccacgctatatcttcactactaactga

SEQ ID NO: 3711 - DNA, 37 bp, Artificial Sequence
  Synthetic oligonucleotide
gcgaagtttcacttccagtttctgacgcccttcatga

SEQ ID NO: 3712 - DNA, 36 bp, Artificial Sequence
  Synthetic oligonucleotide
tcctaggctgctcttcgccgcacaccggacttcaca

SEQ ID NO: 3713 - DNA, 38 bp, Artificial Sequence
  Synthetic oligonucleotide
catgcaccggtctcacggtcgcataataactatcatta

SEQ ID NO: 3714 - DNA, 38 bp, Artificial Sequence
  Synthetic oligonucleotide
tgtcaatatctgaatcggtggatattggcggaggttga

SEQ ID NO: 3715 - DNA, 37 bp, Artificial Sequence
  Synthetic oligonucleotide
gggtaccgtgcagactcacagaacctaatatatagga

SEQ ID NO: 3716 - DNA, 37 bp, Artificial Sequence
  Synthetic oligonucleotide
tttaccctgcatcgatcgcgagacccaccaatcatga

SEQ ID NO: 3717 - DNA, 37 bp, Artificial Sequence
  Synthetic oligonucleotide
tggcggcccttctaccgcccgtcaccacctctatgga

SEQ ID NO: 3718 - DNA, 36 bp, Artificial Sequence
  Synthetic oligonucleotide
tacaccaataaccatacaactacatctaatacgtta

SEQ ID NO: 3719 - DNA, 37 bp, Artificial Sequence
  Synthetic oligonucleotide
gagtactcgtgatcttttacacacatctgcctaaaga

SEQ ID NO: 3720 - DNA, 36 bp, Artificial Sequence
  Synthetic oligonucleotide
agcaccggaatgcccgggcccttgtacgcctagtga

SEQ ID NO: 3721 - DNA, 35 bp, Artificial Sequence
  Synthetic oligonucleotide
ttaagtcatctgcactagtacgccctatattaaaa

SEQ ID NO: 3722 - DNA, 37 bp, Artificial Sequence
  Synthetic oligonucleotide
agtctcgcagaaaaaatctatttcccatttgactgga

SEQ ID NO: 3723 - DNA, 36 bp, Artificial Sequence
  Synthetic oligonucleotide
aggaactgcctaccatcgatttttaataccacacga

SEQ ID NO: 3724 - DNA, 36 bp, Artificial Sequence
  Synthetic oligonucleotide
tttcttcttatgagggggaggtgcggttcggaataa

SEQ ID NO: 3725 - DNA, 36 bp, Artificial Sequence
  Synthetic oligonucleotide
gccaggattcggccattttacctatctcgatttaaa

SEQ ID NO: 3726 - DNA, 38 bp, Artificial Sequence
  Synthetic oligonucleotide
cgtgccgaacaactcacacgctacacctttatttttaa

SEQ ID NO: 3727 - DNA, 36 bp, Artificial Sequence
  Synthetic oligonucleotide
agactatcataactccttcacgaaccttccacataa

SEQ ID NO: 3728 - DNA, 37 bp, Artificial Sequence
  Synthetic oligonucleotide
tcaccgaccctcagtacttcccctgcgcatgactaga

SEQ ID NO: 3729 - DNA, 35 bp, Artificial Sequence
  Synthetic oligonucleotide
tctcactactacccactaaaatcggttgatactac

SEQ ID NO: 3730 - DNA, 35 bp, Artificial Sequence
  Synthetic oligonucleotide
acgcacgggtatgcatcattgatggtttccggtac

SEQ ID NO: 3731 - DNA, 38 bp, Artificial Sequence
  Synthetic oligonucleotide
acgttcctgtacgccgcgggcggtattttcacaattga

SEQ ID NO: 3732 - DNA, 38 bp, Artificial Sequence
  Synthetic oligonucleotide
tcgccctatcaactccctgtattttcatccctcaatca

SEQ ID NO: 3733 - DNA, 35 bp, Artificial Sequence
  Synthetic oligonucleotide
cgcctacgatcacttccccgcgcgactgtctcatc

SEQ ID NO: 3734 - DNA, 37 bp, Artificial Sequence
  Synthetic oligonucleotide
cacaacatatctactctatactagctcaattcaccga

SEQ ID NO: 3735 - DNA, 36 bp, Artificial Sequence
  Synthetic oligonucleotide
cattgcgaccttatcccaccacgaattgccactaaa

SEQ ID NO: 3736 - DNA, 35 bp, Artificial Sequence
  Synthetic oligonucleotide
ttactatccagtatcacaccgaccttccaatccga

SEQ ID NO: 3737 - DNA, 37 bp, Artificial Sequence
  Synthetic oligonucleotide
agaacttgatcgtttctggggtttgggaatcatgtga

SEQ ID NO: 3738 - DNA, 35 bp, Artificial Sequence
  Synthetic oligonucleotide
gggcttgcaaacaacttcacgtatgatccgcacct

SEQ ID NO: 3739 - DNA, 35 bp, Artificial Sequence
  Synthetic oligonucleotide
aatcccgtgagggtcgtttcaagtttcaataatcc

SEQ ID NO: 3740 - DNA, 37 bp, Artificial Sequence
  Synthetic oligonucleotide
ggcttacacagccacctatctttggccaatttataga

SEQ ID NO: 3741 - DNA, 36 bp, Artificial Sequence
  Synthetic oligonucleotide
agcgccttaggcttccttctgcggctaaccatcata

SEQ ID NO: 3742 - DNA, 35 bp, Artificial Sequence
  Synthetic oligonucleotide
gaattagctcacttactatttcattttgaccataa

SEQ ID NO: 3743 - DNA, 35 bp, Artificial Sequence
  Synthetic oligonucleotide
ggccttccccttcatccgcctcaacgctggccacc

SEQ ID NO: 3744 - DNA, 36 bp, Artificial Sequence
  Synthetic oligonucleotide
aggcaggcgactacggatcaacatttctatacccta

SEQ ID NO: 3745 - DNA, 36 bp, Artificial Sequence
  Synthetic oligonucleotide
gttagtgcgtattgtaggctgacgaacgctaccgta

SEQ ID NO: 3746 - DNA, 36 bp, Artificial Sequence
  Synthetic oligonucleotide
gcggcccggcgatcctctagtccaaccggtctacta

SEQ ID NO: 3747 - DNA, 38 bp, Artificial Sequence
  Synthetic oligonucleotide
gggggggcacgtacgacattaggtccttaaatcactca

SEQ ID NO: 3748 - DNA, 36 bp, Artificial Sequence
  Synthetic oligonucleotide
taaccgcgtacggactcaagccacccctattaaaca

SEQ ID NO: 3749 - DNA, 35 bp, Artificial Sequence
  Synthetic oligonucleotide
gctatttgttaagtccagtcgcaaatcaccactat

SEQ ID NO: 3750 - DNA, 36 bp, Artificial Sequence
  Synthetic oligonucleotide
ccgggcactcggactttcactctgtcagtttctaca

SEQ ID NO: 3751 - DNA, 36 bp, Artificial Sequence
  Synthetic oligonucleotide
tcgcaatatatatctccgtggtgtaccatcagtcaa

SEQ ID NO: 3752 - DNA, 35 bp, Artificial Sequence
  Synthetic oligonucleotide
ccctctactggcttctacgtcgcacgactgctacc

SEQ ID NO: 3753 - DNA, 34 bp, Artificial Sequence
  Synthetic oligonucleotide
aacctcacatgctggcgatcactagcaaaccacc

SEQ ID NO: 3754 - DNA, 38 bp, Artificial Sequence
  Synthetic oligonucleotide
aaactgccttgaacaagtttcgatatcacattccatga

SEQ ID NO: 3755 - DNA, 35 bp, Artificial Sequence
  Synthetic oligonucleotide
cctcataaccgattaccaacgccatcaaaatatag

SEQ ID NO: 3756 - DNA, 36 bp, Artificial Sequence
  Synthetic oligonucleotide
aacaaggccaaaatacgcatataattctggttgaaa

SEQ ID NO: 3757 - DNA, 35 bp, Artificial Sequence
  Synthetic oligonucleotide
agtgcgaactcttattactgctattaaaactgtcc

SEQ ID NO: 3758 - DNA, 36 bp, Artificial Sequence
  Synthetic oligonucleotide
tcttgctacgtttgttcgcaccaaacttgtcctgca

SEQ ID NO: 3759 - DNA, 34 bp, Artificial Sequence
  Synthetic oligonucleotide
gttctcgcgcgcacatcaattatatcacaaataa

SEQ ID NO: 3760 - DNA, 38 bp, Artificial Sequence
  Synthetic oligonucleotide
atttacgttcgcttcatggacgcggtcataggacctga

SEQ ID NO: 3761 - DNA, 37 bp, Artificial Sequence
  Synthetic oligonucleotide
tcgcaccggccctcaataccatttacacatccacgga

SEQ ID NO: 3762 - DNA, 36 bp, Artificial Sequence
  Synthetic oligonucleotide
ctcgccacgacttaattctcaattcctcacaactga

SEQ ID NO: 3763 - DNA, 36 bp, Artificial Sequence
  Synthetic oligonucleotide
aactgtacggcgcaattttactctcaagtaccaaaa

SEQ ID NO: 3764 - DNA, 36 bp, Artificial Sequence
  Synthetic oligonucleotide
cactgtcaagttttccattccactatacatcaatca

SEQ ID NO: 3765 - DNA, 37 bp, Artificial Sequence
  Synthetic oligonucleotide
ctttcatcataacccggggaatttaccggccgcctca

SEQ ID NO: 3766 - DNA, 38 bp, Artificial Sequence
  Synthetic oligonucleotide
ggtatttgctagatcttcaattacctcgccgtatataa

SEQ ID NO: 3767 - DNA, 35 bp, Artificial Sequence
  Synthetic oligonucleotide
tgcctgcattgctcgtggaggctcattgactttca

SEQ ID NO: 3768 - DNA, 38 bp, Artificial Sequence
  Synthetic oligonucleotide
ctctgtccttgctttctctctcattccgatgactatga

SEQ ID NO: 3769 - DNA, 38 bp, Artificial Sequence
  Synthetic oligonucleotide
gatctccacttcaggcgccattctatacccattaatga

SEQ ID NO: 3770 - DNA, 38 bp, Artificial Sequence
  Synthetic oligonucleotide
tatcaattttattaataccctcattgtgctcctactga

SEQ ID NO: 3771 - DNA, 35 bp, Artificial Sequence
  Synthetic oligonucleotide
gatgcgagaaccactatccatcccacacgccgatt

SEQ ID NO: 3772 - DNA, 36 bp, Artificial Sequence
  Synthetic oligonucleotide
agcactctgtcaggtcgatcattatttcacaacaca

SEQ ID NO: 3773 - DNA, 36 bp, Artificial Sequence
  Synthetic oligonucleotide
gagttcggccctcgttgatcctcgattacaaattaa

SEQ ID NO: 3774 - DNA, 38 bp, Artificial Sequence
  Synthetic oligonucleotide
gggggtacgtccagcttatcatctcataccattattga

SEQ ID NO: 3775 - DNA, 38 bp, Artificial Sequence
  Synthetic oligonucleotide
cgcacgtcacgagcacaccaacactacttcaccactga

SEQ ID NO: 3776 - DNA, 35 bp, Artificial Sequence
  Synthetic oligonucleotide
acatgtcgtccacctatgttgttaccattatttat

SEQ ID NO: 3777 - DNA, 35 bp, Artificial Sequence
  Synthetic oligonucleotide
attcaatcccctcctatggcttgccccccggttct

SEQ ID NO: 3778 - DNA, 36 bp, Artificial Sequence
  Synthetic oligonucleotide
cggtattcgtacgtctgcgcgcaacccattataaca

SEQ ID NO: 3779 - DNA, 38 bp, Artificial Sequence
  Synthetic oligonucleotide
tccatgcagccacgctcagttactactactagtgatga

SEQ ID NO: 3780 - DNA, 35 bp, Artificial Sequence
  Synthetic oligonucleotide
atcacatttccatcgatctccaaggttctcaaact

SEQ ID NO: 3781 - DNA, 35 bp, Artificial Sequence
  Synthetic oligonucleotide
gtgttcctcacactaatcgttctactttcttaact

SEQ ID NO: 3782 - DNA, 36 bp, Artificial Sequence
  Synthetic oligonucleotide
tcacactccatagatctctcggtagacgcagtccga

SEQ ID NO: 3783 - DNA, 36 bp, Artificial Sequence
  Synthetic oligonucleotide
ccattacaacactacctctatatggtcctatccgca

SEQ ID NO: 3784 - DNA, 36 bp, Artificial Sequence
  Synthetic oligonucleotide
cgctatctctacgccaattaagtcgctcctggtaca

SEQ ID NO: 3785 - DNA, 36 bp, Artificial Sequence
  Synthetic oligonucleotide
gcagataccaagtcattactttattatacataacca

SEQ ID NO: 3786 - DNA, 36 bp, Artificial Sequence
  Synthetic oligonucleotide
attcgtactctataaattccaatggcgtacccacaa

SEQ ID NO: 3787 - DNA, 35 bp, Artificial Sequence
  Synthetic oligonucleotide
tcagtacaccattaatcaccatatcacgcattatc

SEQ ID NO: 3788 - DNA, 38 bp, Artificial Sequence
  Synthetic oligonucleotide
aaccgggtacccacaccacccgtaaccatcccaattta

SEQ ID NO: 3789 - DNA, 35 bp, Artificial Sequence
  Synthetic oligonucleotide
aaacggacgcgcgaaactagttggaacattattcc

SEQ ID NO: 3790 - DNA, 35 bp, Artificial Sequence
  Synthetic oligonucleotide
aacaacgaaataggaaatcctctgctgaaccaaat

SEQ ID NO: 3791 - DNA, 35 bp, Artificial Sequence
  Synthetic oligonucleotide
catgccccccgagtttcgtagttattttcctaaac

SEQ ID NO: 3792 - DNA, 35 bp, Artificial Sequence
  Synthetic oligonucleotide
acgcaattcagaacatattcgcaactctttcaaat

SEQ ID NO: 3793 - DNA, 35 bp, Artificial Sequence
  Synthetic oligonucleotide
tttcgaattctccacctgatacccgccacattaaa

SEQ ID NO: 3794 - DNA, 36 bp, Artificial Sequence
  Synthetic oligonucleotide
accctcctattaacccatcaaaagttcgctaccata

SEQ ID NO: 3795 - DNA, 37 bp, Artificial Sequence
  Synthetic oligonucleotide
atactccacaacgaacatccaaactgtttacatcaga

SEQ ID NO: 3796 - DNA, 36 bp, Artificial Sequence
  Synthetic oligonucleotide
gagtacctagccgcaccggtcttaattttcttaaaa

SEQ ID NO: 3797 - DNA, 35 bp, Artificial Sequence
  Synthetic oligonucleotide
aagctgcacggatcttccatgtcccctctattaaa

SEQ ID NO: 3798 - DNA, 37 bp, Artificial Sequence
  Synthetic oligonucleotide
agttctattatggctcctaactgttcttgttttcaga

SEQ ID NO: 3799 - DNA, 36 bp, Artificial Sequence
  Synthetic oligonucleotide
acactcgcctagaagccaccacccatttctcataaa

SEQ ID NO: 3800 - DNA, 37 bp, Artificial Sequence
  Synthetic oligonucleotide
cctccaccatccgaacattaactaattacccgccaga

SEQ ID NO: 3801 - DNA, 35 bp, Artificial Sequence
  Synthetic oligonucleotide
tacttcctatagttacccacatctactaaccaaac

SEQ ID NO: 3802 - DNA, 36 bp, Artificial Sequence
  Synthetic oligonucleotide
gagtactggcacgcgataccctaactgtacatcaca

SEQ ID NO: 3803 - DNA, 35 bp, Artificial Sequence
  Synthetic oligonucleotide
agccagcaaggctagcatcacataattctcatatc

SEQ ID NO: 3804 - DNA, 37 bp, Artificial Sequence
  Synthetic oligonucleotide
atgaatccgcactactaaaacaatttatccttataga

SEQ ID NO: 3805 - DNA, 37 bp, Artificial Sequence
  Synthetic oligonucleotide
tctgtgctggctttagaaggttttctgttttttccta

SEQ ID NO: 3806 - DNA, 35 bp, Artificial Sequence
  Synthetic oligonucleotide
acatagcactgctaggtttatctcattgtttttaa

SEQ ID NO: 3807 - DNA, 38 bp, Artificial Sequence
  Synthetic oligonucleotide
ttctggcaattggcctctcactctctatggttttgtga

SEQ ID NO: 3808 - DNA, 35 bp, Artificial Sequence
  Synthetic oligonucleotide
ttttgatttattctgcttgctgtttgggcttcttt

SEQ ID NO: 3809 - DNA, 38 bp, Artificial Sequence
  Synthetic oligonucleotide
tatattcacaatcgattcttttcacttcctcattttga

SEQ ID NO: 3810 - DNA, 35 bp, Artificial Sequence
  Synthetic oligonucleotide
tgtaggagttgtctctttttcatattttctgtctt

SEQ ID NO: 3811 - DNA, 35 bp, Artificial Sequence
  Synthetic oligonucleotide
taggactggttaatcctccgaaattgtttttctat

SEQ ID NO: 3812 - DNA, 38 bp, Artificial Sequence
  Synthetic oligonucleotide
ttctatcgggggagttcctactctggtttttttcttga

SEQ ID NO: 3813 - DNA, 35 bp, Artificial Sequence
  Synthetic oligonucleotide
gcctgggtggttatttttttccatatcgaaattta

SEQ ID NO: 3814 - DNA, 36 bp, Artificial Sequence
  Synthetic oligonucleotide
ttagttttctcactgtttcccgttgactattctcta

SEQ ID NO: 3815 - DNA, 38 bp, Artificial Sequence
  Synthetic oligonucleotide
ctagtgaccactgcttcttttggttatcttaatcttga

SEQ ID NO: 3816 - DNA, 35 bp, Artificial Sequence
  Synthetic oligonucleotide
gcctgggttgttatttttttccatatcgaaattta

SEQ ID NO: 3817 - DNA, 38 bp, Artificial Sequence
  Synthetic oligonucleotide
tgtatgattttggtttttgttttggtttcacgtggtga

SEQ ID NO: 3818 - DNA, 38 bp, Artificial Sequence
  Synthetic oligonucleotide
gcagtgttatttctcttggtttctttgatttcacttga

SEQ ID NO: 3819 - DNA, 38 bp, Artificial Sequence
  Synthetic oligonucleotide
ttctatcgggggagttcctactcttgtttttttcttga

SEQ ID NO: 3820 - DNA, 38 bp, Artificial Sequence
  Synthetic oligonucleotide
ggcctggttctcgtacatctgtattttggtttttctga

SEQ ID NO: 3821 - DNA, 35 bp, Artificial Sequence
  Synthetic oligonucleotide
gcacccggggtttttatctgagttgtttttcattt

SEQ ID NO: 3822 - DNA, 36 bp, Artificial Sequence
  Synthetic oligonucleotide
tttatccattgtccttggactctcctccgtttagaa

SEQ ID NO: 3823 - DNA, 38 bp, Artificial Sequence
  Synthetic oligonucleotide
ctgcgctggccaatctcatgttttgtttttattaatga

SEQ ID NO: 3824 - DNA, 36 bp, Artificial Sequence
  Synthetic oligonucleotide
tgcttctttaatctgttttctactattttgatataa

SEQ ID NO: 3825 - DNA, 38 bp, Artificial Sequence
  Synthetic oligonucleotide
gatcccgaattgttttcctattaatcgttttcccatga

SEQ ID NO: 3826 - DNA, 38 bp, Artificial Sequence
  Synthetic oligonucleotide
tcccttgggactctttggttattaacatttctctttga

SEQ ID NO: 3827 - DNA, 36 bp, Artificial Sequence
  Synthetic oligonucleotide
tctaactgctggaccctcctgttttttattagtcta

SEQ ID NO: 3828 - DNA, 38 bp, Artificial Sequence
  Synthetic oligonucleotide
gcagtacggaggtttaagttgtttctcctattttttga

SEQ ID NO: 3829 - DNA, 35 bp, Artificial Sequence
  Synthetic oligonucleotide
atgaccgtttcttggaagtttccgattttttttgt

SEQ ID NO: 3830 - DNA, 36 bp, Artificial Sequence
  Synthetic oligonucleotide
taatgcattgttcgcacctggtttttttaatggtta

SEQ ID NO: 3831 - DNA, 38 bp, Artificial Sequence
  Synthetic oligonucleotide
gagcaataattcctgtttctatctctacaaccatttga

SEQ ID NO: 3832 - DNA, 36 bp, Artificial Sequence
  Synthetic oligonucleotide
actgacttaatctaatttgttttccattctcatgaa

SEQ ID NO: 3833 - DNA, 38 bp, Artificial Sequence
  Synthetic oligonucleotide
gtgcacgggcgttttttaatttaagtttcttgttttga

SEQ ID NO: 3834 - DNA, 35 bp, Artificial Sequence
  Synthetic oligonucleotide
ttatactatccaaatctcgtgtctttcctcattat

SEQ ID NO: 3835 - DNA, 36 bp, Artificial Sequence
  Synthetic oligonucleotide
gtcgtaatttgttctttatatctatttcttgttgta

SEQ ID NO: 3836 - DNA, 36 bp, Artificial Sequence
  Synthetic oligonucleotide
ccttggagttgctggtaacctgttgttttttattga

SEQ ID NO: 3837 - DNA, 35 bp, Artificial Sequence
  Synthetic oligonucleotide
acgtgcctgataattatatgtatgtttcttgtttt

SEQ ID NO: 3838 - DNA, 36 bp, Artificial Sequence
  Synthetic oligonucleotide
atctttcacttagtctcggagttttttgtttcctta

SEQ ID NO: 3839 - DNA, 36 bp, Artificial Sequence
  Synthetic oligonucleotide
attcgtttatttttatttcctgattggtttatttca

SEQ ID NO: 3840 - DNA, 35 bp, Artificial Sequence
  Synthetic oligonucleotide
ttcactggtttttttctttctgacctatagattgc

SEQ ID NO: 3841 - DNA, 36 bp, Artificial Sequence
  Synthetic oligonucleotide
ttgctaatttctgggtttgttacgtccttttatata

SEQ ID NO: 3842 - DNA, 36 bp, Artificial Sequence
  Synthetic oligonucleotide
tacttttttgatttttgatcttggcccacgaaataa

SEQ ID NO: 3843 - DNA, 37 bp, Artificial Sequence
  Synthetic oligonucleotide
tctctcttgtcaatagaatttttgtttgtatcttcga

SEQ ID NO: 3844 - DNA, 36 bp, Artificial Sequence
  Synthetic oligonucleotide
tgtgctcactatgtctctccgttgtctgttttttta

SEQ ID NO: 3845 - DNA, 36 bp, Artificial Sequence
  Synthetic oligonucleotide
aatcaagcagggttcaccattgtcgtttttttttta

SEQ ID NO: 3846 - DNA, 38 bp, Artificial Sequence
  Synthetic oligonucleotide
gatgtactgttcgttttgttttgtccttttcatcatga

SEQ ID NO: 3847 - DNA, 36 bp, Artificial Sequence
  Synthetic oligonucleotide
cgcatactgccgcatcgcatttgttttattgttgta

SEQ ID NO: 3848 - DNA, 35 bp, Artificial Sequence
  Synthetic oligonucleotide
ttgtggttgttcatacctgctatcttttttcgttt

SEQ ID NO: 3849 - DNA, 38 bp, Artificial Sequence
  Synthetic oligonucleotide
gagtgatgcggaataaatcgctttgttttgtttcctga

SEQ ID NO: 3850 - DNA, 35 bp, Artificial Sequence
  Synthetic oligonucleotide
ttagtaggtaactttcactgtttttttatcgtttt

SEQ ID NO: 3851 - DNA, 37 bp, Artificial Sequence
  Synthetic oligonucleotide
gggtctctttttctttaactcttttatctaaatttga

SEQ ID NO: 3852 - DNA, 38 bp, Artificial Sequence
  Synthetic oligonucleotide
tgacgtttttttgactggtttttctgaagtggttttga

SEQ ID NO: 3853 - DNA, 35 bp, Artificial Sequence
  Synthetic oligonucleotide
gacgccaccgttttttattttagttgatttagata

SEQ ID NO: 3854 - DNA, 38 bp, Artificial Sequence
  Synthetic oligonucleotide
tcataaatcactctatctttgtttttcagtcttagtga

SEQ ID NO: 3855 - DNA, 35 bp, Artificial Sequence
  Synthetic oligonucleotide
ttacggatgcttttttttgtcctgagattactttt

SEQ ID NO: 3856 - DNA, 35 bp, Artificial Sequence
  Synthetic oligonucleotide
gactgtacgatggcttaattgttttgtattttgtt

SEQ ID NO: 3857 - DNA, 35 bp, Artificial Sequence
  Synthetic oligonucleotide
ttattgtttctaccatgtttgttgcatatgttttt

SEQ ID NO: 3858 - DNA, 38 bp, Artificial Sequence
  Synthetic oligonucleotide
tttttccgttcaactctactttcgatatattatggtga

SEQ ID NO: 3859 - DNA, 37 bp, Artificial Sequence
  Synthetic oligonucleotide
tagtctttccgattgtttttgttatttatatgcctga

SEQ ID NO: 3860 - DNA, 36 bp, Artificial Sequence
  Synthetic oligonucleotide
gcggggcgccctcgatttggttttatttttctcaca

SEQ ID NO: 3861 - DNA, 37 bp, Artificial Sequence
  Synthetic oligonucleotide
tgttacttttttatcttgttctgccatctctaattga

SEQ ID NO: 3862 - DNA, 36 bp, Artificial Sequence
  Synthetic oligonucleotide
tatctatcactaagtttttatatctaaggtccatta

SEQ ID NO: 3863 - DNA, 38 bp, Artificial Sequence
  Synthetic oligonucleotide
ggctttgttcattttcttactctttgtttgtagtttga

SEQ ID NO: 3864 - DNA, 38 bp, Artificial Sequence
  Synthetic oligonucleotide
gccggtttatttaccgagtttttcatcttttcttatga

SEQ ID NO: 3865 - DNA, 37 bp, Artificial Sequence
  Synthetic oligonucleotide
agggtactagcattttcgattttgtgaaattttctga

SEQ ID NO: 3866 - DNA, 38 bp, Artificial Sequence
  Synthetic oligonucleotide
atactgcagtagcacttgtcgtttttctccaatattga

SEQ ID NO: 3867 - DNA, 35 bp, Artificial Sequence
  Synthetic oligonucleotide
ttcgttcctaagaatttgccatttgttttttggtc

SEQ ID NO: 3868 - DNA, 37 bp, Artificial Sequence
  Synthetic oligonucleotide
tcactctatccagcatgcgaggtgttattctatttga

SEQ ID NO: 3869 - DNA, 35 bp, Artificial Sequence
  Synthetic oligonucleotide
agtcgatagaataattttttggttttctcactcat

SEQ ID NO: 3870 - DNA, 35 bp, Artificial Sequence
  Synthetic oligonucleotide
tactgtccttttcaattcgtgtcttggttttatta

SEQ ID NO: 3871 - DNA, 38 bp, Artificial Sequence
  Synthetic oligonucleotide
taaacgtggtactgcgcacggttatttctttctcttga

SEQ ID NO: 3872 - DNA, 38 bp, Artificial Sequence
  Synthetic oligonucleotide
tggggtacttgcctactttttacctggttgttatttga

SEQ ID NO: 3873 - DNA, 38 bp, Artificial Sequence
  Synthetic oligonucleotide
ttggggttaacgttctgatctcgttttcttattattga

SEQ ID NO: 3874 - DNA, 36 bp, Artificial Sequence
  Synthetic oligonucleotide
ggaatgcagcactcgaggttttctttgtttttccca

SEQ ID NO: 3875 - DNA, 38 bp, Artificial Sequence
  Synthetic oligonucleotide
gcgcccaaatccgttgctttgttgttttgtacttttga

SEQ ID NO: 3876 - DNA, 38 bp, Artificial Sequence
  Synthetic oligonucleotide
agtagcctttctctcgatctttgtttgttttttgatga

SEQ ID NO: 3877 - DNA, 38 bp, Artificial Sequence
  Synthetic oligonucleotide
actttcggttgaccatcatatatctctttcttacttga

SEQ ID NO: 3878 - DNA, 35 bp, Artificial Sequence
  Synthetic oligonucleotide
gtcgtaccaatatcggatatcctggtttttctgtc

SEQ ID NO: 3879 - DNA, 38 bp, Artificial Sequence
  Synthetic oligonucleotide
ttactgaacctctccggccctctattttttgaagttga

SEQ ID NO: 3880 - DNA, 35 bp, Artificial Sequence
  Synthetic oligonucleotide
ttttccgtttaattcgatcactttcattgtctcca

SEQ ID NO: 3881 - DNA, 35 bp, Artificial Sequence
  Synthetic oligonucleotide
gcgttgacatgggattctttgtctcttagtctttt

SEQ ID NO: 3882 - DNA, 37 bp, Artificial Sequence
  Synthetic oligonucleotide
agttctattatggctcctaactgttcttgttttccga

SEQ ID NO: 3883 - DNA, 38 bp, Artificial Sequence
  Synthetic oligonucleotide
gctgcactctacacttatggttgtctatcttttactga

SEQ ID NO: 3884 - DNA, 38 bp, Artificial Sequence
  Synthetic oligonucleotide
tgaacgtagcagttttgacatttagtatatctttttga

SEQ ID NO: 3885 - DNA, 35 bp, Artificial Sequence
  Synthetic oligonucleotide
gcggtccgtatgggatttttatttcgttcttgtta

SEQ ID NO: 3886 - DNA, 35 bp, Artificial Sequence
  Synthetic oligonucleotide
ttttaggggtcctgtacattctatccttttatcat

SEQ ID NO: 3887 - DNA, 37 bp, Artificial Sequence
  Synthetic oligonucleotide
ttgtccttccctgttagtctatcatctttcctctgga

SEQ ID NO: 3888 - DNA, 35 bp, Artificial Sequence
  Synthetic oligonucleotide
acgacgccccttttgttgtttttcttggtatcttc

SEQ ID NO: 3889 - DNA, 38 bp, Artificial Sequence
  Synthetic oligonucleotide
gagggccccctatcatattgtttttttatcctccatga

SEQ ID NO: 3890 - DNA, 36 bp, Artificial Sequence
  Synthetic oligonucleotide
tgctgccgtaacactgtttatttctattcttgatta

SEQ ID NO: 3891 - DNA, 37 bp, Artificial Sequence
  Synthetic oligonucleotide
tcgactctggtttgtttttttggtttattacttcgga

SEQ ID NO: 3892 - DNA, 35 bp, Artificial Sequence
  Synthetic oligonucleotide
tgttcaaccggtcccattgttttttgtcgtaatct

SEQ ID NO: 3893 - DNA, 35 bp, Artificial Sequence
  Synthetic oligonucleotide
cacgccttccttttgggttgttgatctcgtttttt

SEQ ID NO: 3894 - DNA, 38 bp, Artificial Sequence
  Synthetic oligonucleotide
aaacgcatttggctcaattgatcttattatttttctga

SEQ ID NO: 3895 - DNA, 36 bp, Artificial Sequence
  Synthetic oligonucleotide
tttaccttgccctggttacgaaatatttgtctctca

SEQ ID NO: 3896 - DNA, 38 bp, Artificial Sequence
  Synthetic oligonucleotide
tataccatcgcttctcatactggggtttatttttttga

SEQ ID NO: 3897 - DNA, 37 bp, Artificial Sequence
  Synthetic oligonucleotide
taaatcgttctcgtaacaccttctatcttttttatga

SEQ ID NO: 3898 - DNA, 35 bp, Artificial Sequence
  Synthetic oligonucleotide
atggatttggccttcactctatgttctcgttttct

SEQ ID NO: 3899 - DNA, 38 bp, Artificial Sequence
  Synthetic oligonucleotide
catcgcatctcgaacgggccttttgttttattatttga

SEQ ID NO: 3900 - DNA, 35 bp, Artificial Sequence
  Synthetic oligonucleotide
gcctttacacatttctgttttgataaagtaattct

SEQ ID NO: 3901 - DNA, 38 bp, Artificial Sequence
  Synthetic oligonucleotide
gtgcgctatctaatgtcaccgtttttttcctcaattga

SEQ ID NO: 3902 - DNA, 37 bp, Artificial Sequence
  Synthetic oligonucleotide
tgtcacgtacctcgtgtttcttttctgttaaacttga

SEQ ID NO: 3903 - DNA, 38 bp, Artificial Sequence
  Synthetic oligonucleotide
aatggaacaaactactttcattttctttctctcattga

SEQ ID NO: 3904 - DNA, 38 bp, Artificial Sequence
  Synthetic oligonucleotide
tttcccaaatctagcttttttcaataatccatatctga

SEQ ID NO: 3905 - DNA, 38 bp, Artificial Sequence
  Synthetic oligonucleotide
ttccatctcaccaatgttggtgactgttgccattttga

SEQ ID NO: 3906 - DNA, 37 bp, Artificial Sequence
  Synthetic oligonucleotide
actcgtgtttttttcgttttgtgcccttcgattctta

SEQ ID NO: 3907 - DNA, 35 bp, Artificial Sequence
  Synthetic oligonucleotide
agtgcccggattagctggctacagtttttttctct

SEQ ID NO: 3908 - DNA, 35 bp, Artificial Sequence
  Synthetic oligonucleotide
aaactccttttttgtatgtcgccatttctttctta

SEQ ID NO: 3909 - DNA, 36 bp, Artificial Sequence
  Synthetic oligonucleotide
tcttggcatgtcctcgttttttgatatctgctttta

SEQ ID NO: 3910 - DNA, 36 bp, Artificial Sequence
  Synthetic oligonucleotide
tgtcgtagtagtgcgcatttgtttaactctctatca

SEQ ID NO: 3911 - DNA, 38 bp, Artificial Sequence
  Synthetic oligonucleotide
tccactgtttacggttttaaattgtttccttgccctga

SEQ ID NO: 3912 - DNA, 38 bp, Artificial Sequence
  Synthetic oligonucleotide
agtccatgcgagctgcatgtactctcggttttttatga

SEQ ID NO: 3913 - DNA, 37 bp, Artificial Sequence
  Synthetic oligonucleotide
gcgtgtttagttaattcgttttttaccaatggggtga

SEQ ID NO: 3914 - DNA, 38 bp, Artificial Sequence
  Synthetic oligonucleotide
agtttcccttccgtttctttctcagtttaactctttga

SEQ ID NO: 3915 - DNA, 38 bp, Artificial Sequence
  Synthetic oligonucleotide
ggtgctccgggcttgtaactttatagttttttccttga

SEQ ID NO: 3916 - DNA, 35 bp, Artificial Sequence
  Synthetic oligonucleotide
gactctttgatctccttgaacgtttttgttatttc

SEQ ID NO: 3917 - DNA, 38 bp, Artificial Sequence
  Synthetic oligonucleotide
tcgtttccaatgatttctcgatttacactccatcttga

SEQ ID NO: 3918 - DNA, 38 bp, Artificial Sequence
  Synthetic oligonucleotide
tttctgtcaacactctcgaacatatatttactccttga

SEQ ID NO: 3919 - DNA, 37 bp, Artificial Sequence
  Synthetic oligonucleotide
acgcggagcggttgtttttttttttgtaatccacaga

SEQ ID NO: 3920 - DNA, 36 bp, Artificial Sequence
  Synthetic oligonucleotide
ttgttaacttttcatctcatctttttcgttacgtga

SEQ ID NO: 3921 - DNA, 38 bp, Artificial Sequence
  Synthetic oligonucleotide
acgttggtgcaaacgttttttgatttctagtattttga

SEQ ID NO: 3922 - DNA, 38 bp, Artificial Sequence
  Synthetic oligonucleotide
tatgccctctaattctgggcttttttttctgttgttga

SEQ ID NO: 3923 - DNA, 38 bp, Artificial Sequence
  Synthetic oligonucleotide
gtttcatcttgttttattagatcttagattttttgtga

SEQ ID NO: 3924 - DNA, 38 bp, Artificial Sequence
  Synthetic oligonucleotide
gcaatgcgatttgtttcgtgtttatcctatctagctga

SEQ ID NO: 3925 - DNA, 38 bp, Artificial Sequence
  Synthetic oligonucleotide
tcgtgcttttctggtagttgaccacactgtttttttga

SEQ ID NO: 3926 - DNA, 38 bp, Artificial Sequence
  Synthetic oligonucleotide
ttccatacgtatatttttttgaaattcgacttttttga

SEQ ID NO: 3927 - DNA, 38 bp, Artificial Sequence
  Synthetic oligonucleotide
acgtttttgacctctagttctgtagcattttgttttga

SEQ ID NO: 3928 - DNA, 38 bp, Artificial Sequence
  Synthetic oligonucleotide
actgaactttttttgtttacgaatccatctattgttga

SEQ ID NO: 3929 - DNA, 38 bp, Artificial Sequence
  Synthetic oligonucleotide
gccgcataggggcaaaattgtttttctctcttacttga

SEQ ID NO: 3930 - DNA, 38 bp, Artificial Sequence
  Synthetic oligonucleotide
accctgggggtttgtaaggctcttttttcgtaatttga

SEQ ID NO: 3931 - DNA, 35 bp, Artificial Sequence
  Synthetic oligonucleotide
agttacataccgtttttcgttacttgaattcaaat

SEQ ID NO: 3932 - DNA, 36 bp, Artificial Sequence
  Synthetic oligonucleotide
acgatcaccacaataatgtctttttttcgttttcta

SEQ ID NO: 3933 - DNA, 36 bp, Artificial Sequence
  Synthetic oligonucleotide
gggactgacatccataatcgggttttttttctagaa

SEQ ID NO: 3934 - DNA, 38 bp, Artificial Sequence
  Synthetic oligonucleotide
atcgggtgcgcccccgaatttttccatgtttttgttga

SEQ ID NO: 3935 - DNA, 37 bp, Artificial Sequence
  Synthetic oligonucleotide
ttttgttacccattttggtccctatcctcactcatga

SEQ ID NO: 3936 - DNA, 36 bp, Artificial Sequence
  Synthetic oligonucleotide
agttggacccgtacgattccctaactttcaacctaa

SEQ ID NO: 3937 - DNA, 36 bp, Artificial Sequence
  Synthetic oligonucleotide
tttctggtctaattatttaaccattctcttgcttta

SEQ ID NO: 3938 - DNA, 38 bp, Artificial Sequence
  Synthetic oligonucleotide
attggcgcctatactgctttgtattgttttcgatttga

SEQ ID NO: 3939 - DNA, 38 bp, Artificial Sequence
  Synthetic oligonucleotide
tcctacaagcaaacggtgaagttgaattttatttttga

SEQ ID NO: 3940 - DNA, 38 bp, Artificial Sequence
  Synthetic oligonucleotide
actgctgactgttttatttgacgataataattttttga

SEQ ID NO: 3941 - DNA, 35 bp, Artificial Sequence
  Synthetic oligonucleotide
tttggtcgtatattctatttttggatgtgaattac

SEQ ID NO: 3942 - DNA, 38 bp, Artificial Sequence
  Synthetic oligonucleotide
tacggtacatggtggagtctcttttgataattttttga

SEQ ID NO: 3943 - DNA, 38 bp, Artificial Sequence
  Synthetic oligonucleotide
ttttgcaatggtgattaatgcggttcgcctgtttttga

SEQ ID NO: 3944 - DNA, 35 bp, Artificial Sequence
  Synthetic oligonucleotide
aggttgcagtccgggatctttattgttaatattta

SEQ ID NO: 3945 - DNA, 36 bp, Artificial Sequence
  Synthetic oligonucleotide
gtttaggctgtcaatggccttttgtttttattttaa

SEQ ID NO: 3946 - DNA, 38 bp, Artificial Sequence
  Synthetic oligonucleotide
aggacttattacattctctgtgttccttatctttatga

SEQ ID NO: 3947 - DNA, 35 bp, Artificial Sequence
  Synthetic oligonucleotide
gctctttcctgtcttgtttatttcgttggttttcc

SEQ ID NO: 3948 - DNA, 35 bp, Artificial Sequence
  Synthetic oligonucleotide
gggttacgtacccgactttttttctggttttctct

SEQ ID NO: 3949 - DNA, 36 bp, Artificial Sequence
  Synthetic oligonucleotide
tcgcaagctaatagctttattttttctgtctttcta

SEQ ID NO: 3950 - DNA, 38 bp, Artificial Sequence
  Synthetic oligonucleotide
ttactatgcatcgtttgaatccgttgtttctccactga

SEQ ID NO: 3951 - DNA, 38 bp, Artificial Sequence
  Synthetic oligonucleotide
tggagtttctgctgctcgacttggtatcctgtttgtga

SEQ ID NO: 3952 - DNA, 38 bp, Artificial Sequence
  Synthetic oligonucleotide
gagtaccgtgtcaacgtttttttttgtattatcaatga

SEQ ID NO: 3953 - DNA, 38 bp, Artificial Sequence
  Synthetic oligonucleotide
tctattaacccgtttacgtgctcacctcgtttttttga

SEQ ID NO: 3954 - DNA, 37 bp, Artificial Sequence
  Synthetic oligonucleotide
gcatgagctcatttgttttatcttgtcgttttttgga

SEQ ID NO: 3955 - DNA, 38 bp, Artificial Sequence
  Synthetic oligonucleotide
ttatctctatactatgttgtttctctatttaccactga

SEQ ID NO: 3956 - DNA, 37 bp, Artificial Sequence
  Synthetic oligonucleotide
tagctcacgacgatttattttctcatttcttatttga

SEQ ID NO: 3957 - DNA, 35 bp, Artificial Sequence
  Synthetic oligonucleotide
ttgcaaggcatccgccttgagttttttttcagttt

SEQ ID NO: 3958 - DNA, 36 bp, Artificial Sequence
  Synthetic oligonucleotide
gcgttgtttcgttatggggtttcttctcacaatgga

SEQ ID NO: 3959 - DNA, 37 bp, Artificial Sequence
  Synthetic oligonucleotide
gcaaatctccttgtttatccatctattcctcttagga

SEQ ID NO: 3960 - DNA, 37 bp, Artificial Sequence
  Synthetic oligonucleotide
gccgtgcttctctttctttttcggttaaatttcttga

SEQ ID NO: 3961 - DNA, 38 bp, Artificial Sequence
  Synthetic oligonucleotide
gtaggcctttgatttctttccttccgtttcttttgtga

SEQ ID NO: 3962 - DNA, 37 bp, Artificial Sequence
  Synthetic oligonucleotide
atctcggtaatctcatcatgggggttgtttattttga

SEQ ID NO: 3963 - DNA, 37 bp, Artificial Sequence
  Synthetic oligonucleotide
gcaggccgttcctcatatttgttgaattggttgttga

SEQ ID NO: 3964 - DNA, 38 bp, Artificial Sequence
  Synthetic oligonucleotide
accgaacttttttcggattcctcggggtttttttttga

SEQ ID NO: 3965 - DNA, 36 bp, Artificial Sequence
  Synthetic oligonucleotide
tggagtactgggcttgtccgtaatttttatgtaaca

SEQ ID NO: 3966 - DNA, 35 bp, Artificial Sequence
  Synthetic oligonucleotide
tccatgtacgtcgatattgacatctttatttttta

SEQ ID NO: 3967 - DNA, 38 bp, Artificial Sequence
  Synthetic oligonucleotide
atgttaggccacgattgttttattgttgatttttttga

SEQ ID NO: 3968 - DNA, 38 bp, Artificial Sequence
  Synthetic oligonucleotide
gcggctcgcattgctttttatttcgtagactatcctga

SEQ ID NO: 3969 - DNA, 38 bp, Artificial Sequence
  Synthetic oligonucleotide
tctacctggatggcgataattttttttgatctttttga

SEQ ID NO: 3970 - DNA, 35 bp, Artificial Sequence
  Synthetic oligonucleotide
gagtgcccattagtaatttttcttccactttattt

SEQ ID NO: 3971 - DNA, 37 bp, Artificial Sequence
  Synthetic oligonucleotide
gagtttccctttttattagtgccttttagttgtttga

SEQ ID NO: 3972 - DNA, 38 bp, Artificial Sequence
  Synthetic oligonucleotide
ccataacacttggaggttctttgtttgttttgttttga

SEQ ID NO: 3973 - DNA, 38 bp, Artificial Sequence
  Synthetic oligonucleotide
ttatttcctctcttaacgttttttactaacctatatga

SEQ ID NO: 3974 - DNA, 37 bp, Artificial Sequence
  Synthetic oligonucleotide
ccgtccgctcctttaatccgttttgtttttctgctga

SEQ ID NO: 3975 - DNA, 35 bp, Artificial Sequence
  Synthetic oligonucleotide
taattggcttttttacttatatttcctcatttgtt

SEQ ID NO: 3976 - DNA, 35 bp, Artificial Sequence
  Synthetic oligonucleotide
tactacaggcctctttcgattttccgggtgttttt

SEQ ID NO: 3977 - DNA, 36 bp, Artificial Sequence
  Synthetic oligonucleotide
gttctgtggttcgttttcttaatgttagtactctca

SEQ ID NO: 3978 - DNA, 37 bp, Artificial Sequence
  Synthetic oligonucleotide
ggctgttttttcttgtatttcggatttaccaatatga

SEQ ID NO: 3979 - DNA, 35 bp, Artificial Sequence
  Synthetic oligonucleotide
gggggactatctactaggctttcgttttttcctct

SEQ ID NO: 3980 - DNA, 35 bp, Artificial Sequence
  Synthetic oligonucleotide
agcaattatgtgcgtttgtttttaatttatgttca

SEQ ID NO: 3981 - DNA, 37 bp, Artificial Sequence
  Synthetic oligonucleotide
ttccacacggtgttgaacatttgttttattgatttga

SEQ ID NO: 3982 - DNA, 36 bp, Artificial Sequence
  Synthetic oligonucleotide
ggtgtcgcttatttttatctttgaattggtcataaa

SEQ ID NO: 3983 - DNA, 36 bp, Artificial Sequence
  Synthetic oligonucleotide
aacttttattgatatacgcatttttttcctgggata

SEQ ID NO: 3984 - DNA, 37 bp, Artificial Sequence
  Synthetic oligonucleotide
catggtcgtttttctgtcctctaaacttactatccga

SEQ ID NO: 3985 - DNA, 38 bp, Artificial Sequence
  Synthetic oligonucleotide
tagtctatggcttggctttccatggtttcctttcttga

SEQ ID NO: 3986 - DNA, 38 bp, Artificial Sequence
  Synthetic oligonucleotide
agcactttcgtcatagtggttattgttgtaaattgtga

SEQ ID NO: 3987 - DNA, 36 bp, Artificial Sequence
  Synthetic oligonucleotide
ttaagcgtacgaccgagtttttatatcatatcttga

SEQ ID NO: 3988 - DNA, 36 bp, Artificial Sequence
  Synthetic oligonucleotide
gctctctctggtataggtttttttttgttatccaca

SEQ ID NO: 3989 - DNA, 36 bp, Artificial Sequence
  Synthetic oligonucleotide
tgcctaggtatatttcgaattttcataggattttca

SEQ ID NO: 3990 - DNA, 37 bp, Artificial Sequence
  Synthetic oligonucleotide
ttcttttttatgatgatccgatcctattttctttcga

SEQ ID NO: 3991 - DNA, 36 bp, Artificial Sequence
  Synthetic oligonucleotide
ttgttttccttgttatgtttaaactgtcaaaatcca

SEQ ID NO: 3992 - DNA, 37 bp, Artificial Sequence
  Synthetic oligonucleotide
tactgcagatattttaagtttctgttaatctttgtga

SEQ ID NO: 3993 - DNA, 35 bp, Artificial Sequence
  Synthetic oligonucleotide
ttctctcaaaatagtttttctttccgcaggatgta

SEQ ID NO: 3994 - DNA, 38 bp, Artificial Sequence
  Synthetic oligonucleotide
ttttagcgtaactggatttttttcacgacgttttctga

SEQ ID NO: 3995 - DNA, 38 bp, Artificial Sequence
  Synthetic oligonucleotide
catgcatggctttctttccatgttctttctatccatga

SEQ ID NO: 3996 - DNA, 36 bp, Artificial Sequence
  Synthetic oligonucleotide
acatgcgaccgttttcttgactttcttcgttattga

SEQ ID NO: 3997 - DNA, 38 bp, Artificial Sequence
  Synthetic oligonucleotide
agctcctgttttccatttcaaatcacgttaatctatga

SEQ ID NO: 3998 - DNA, 38 bp, Artificial Sequence
  Synthetic oligonucleotide
acggcgcctctcctgattttccatcttttctttcctga

SEQ ID NO: 3999 - DNA, 35 bp, Artificial Sequence
  Synthetic oligonucleotide
tcgatatctcttgtttttgttaaattcgtcttcaa

SEQ ID NO: 4000 - DNA, 38 bp, Artificial Sequence
  Synthetic oligonucleotide
ctctgtcccaaatccgtatccattttttcttactctga

SEQ ID NO: 4001 - DNA, 35 bp, Artificial Sequence
  Synthetic oligonucleotide
gtgcttcgctctctgagtttttcatctgtcaattt

SEQ ID NO: 4002 - DNA, 38 bp, Artificial Sequence
  Synthetic oligonucleotide
aagcaacgctgacctttcagactttttttatttgttga

SEQ ID NO: 4003 - DNA, 38 bp, Artificial Sequence
  Synthetic oligonucleotide
actctttctgggggtttttcttcttatagatttcttga

SEQ ID NO: 4004 - DNA, 36 bp, Artificial Sequence
  Synthetic oligonucleotide
ttatggtacactctctattgatgtttttctatctta

SEQ ID NO: 4005 - DNA, 36 bp, Artificial Sequence
  Synthetic oligonucleotide
ccctcaattaattatgcttgtattttgtttctatct

SEQ ID NO: 4006 - DNA, 38 bp, Artificial Sequence
  Synthetic oligonucleotide
ttctcgctgtttgttttcccattatgttacgctattga

SEQ ID NO: 4007 - DNA, 37 bp, Artificial Sequence
  Synthetic oligonucleotide
gaggttttgcgattggattttttggttgttatcttga

SEQ ID NO: 4008 - DNA, 36 bp, Artificial Sequence
  Synthetic oligonucleotide
aacccgtagtagcacaccctgtcgaacccaaataaa

SEQ ID NO: 4009 - DNA, 36 bp, Artificial Sequence
  Synthetic oligonucleotide
aacacttctaggttcgcaaccccttataaccctaaa

SEQ ID NO: 4010 - DNA, 35 bp, Artificial Sequence
  Synthetic oligonucleotide
actccgcaatattccttttaaatttaggttgcaac

SEQ ID NO: 4011 - DNA, 35 bp, Artificial Sequence
  Synthetic oligonucleotide
acttcaacgagcgttgatagctcggattttatcaa

SEQ ID NO: 4012 - DNA, 36 bp, Artificial Sequence
  Synthetic oligonucleotide
tctgcataacaaactcgacacgccctagccccaata

SEQ ID NO: 4013 - DNA, 37 bp, Artificial Sequence
  Synthetic oligonucleotide
gagtacctcatcgcatatcgagcgcactttatacaga

SEQ ID NO: 4014 - DNA, 35 bp, Artificial Sequence
  Synthetic oligonucleotide
accccaataccattgcacctgaggactcaatcaat

SEQ ID NO: 4015 - DNA, 36 bp, Artificial Sequence
  Synthetic oligonucleotide
ttccaccgagttcctttccagccaatatagcatata

SEQ ID NO: 4016 - DNA, 35 bp, Artificial Sequence
  Synthetic oligonucleotide
ctcattcgctaccaaccctgtgatctcttctaaac

SEQ ID NO: 4017 - DNA, 35 bp, Artificial Sequence
  Synthetic oligonucleotide
aactgtcatccgccgactaactcaatctaactaca

SEQ ID NO: 4018 - DNA, 36 bp, Artificial Sequence
  Synthetic oligonucleotide
gagtactggcacgcgataccctaactgtacatcaaa

SEQ ID NO: 4019 - DNA, 37 bp, Artificial Sequence
  Synthetic oligonucleotide
ggctgcacttatctgtaacacatcactattccccaga

SEQ ID NO: 4020 - DNA, 36 bp, Artificial Sequence
  Synthetic oligonucleotide
tatctcaactcttctatatcacatgaccataataaa

SEQ ID NO: 4021 - DNA, 35 bp, Artificial Sequence
  Synthetic oligonucleotide
tgaacacgaaaaaactaagcattaaatcacacacc

SEQ ID NO: 4022 - DNA, 35 bp, Artificial Sequence
  Synthetic oligonucleotide
aattaaccaacaaacccataacgagtccctttatt

SEQ ID NO: 4023 - DNA, 35 bp, Artificial Sequence
  Synthetic oligonucleotide
aatgtaactggcaatttctttctcactgatttctc

SEQ ID NO: 4024 - DNA, 36 bp, Artificial Sequence
  Synthetic oligonucleotide
acaatactgcctccacacttccaccttcttttgtca

SEQ ID NO: 4025 - DNA, 35 bp, Artificial Sequence
  Synthetic oligonucleotide
acactatcaagcgcttcgcatttcctttctccaat

SEQ ID NO: 4026 - DNA, 35 bp, Artificial Sequence
  Synthetic oligonucleotide
acccgtgcggcttaaccttatcttctttatttcat

SEQ ID NO: 4027 - DNA, 35 bp, Artificial Sequence
  Synthetic oligonucleotide
accgctggggctctttccgacaatttcttccattt

SEQ ID NO: 4028 - DNA, 35 bp, Artificial Sequence
  Synthetic oligonucleotide
acgcaaccgtagcaaatttcttagtgttttttttt

SEQ ID NO: 4029 - DNA, 38 bp, Artificial Sequence
  Synthetic oligonucleotide
acgggtcacgccttccactttacttggttttattttga

SEQ ID NO: 4030 - DNA, 36 bp, Artificial Sequence
  Synthetic oligonucleotide
agcagtcattttacttctgttttccttaaaattcta

SEQ ID NO: 4031 - DNA, 38 bp, Artificial Sequence
  Synthetic oligonucleotide
agccagtcacaacttctcgtttcgctctctttttctga

SEQ ID NO: 4032 - DNA, 38 bp, Artificial Sequence
  Synthetic oligonucleotide
agctaccggggtttaccttcctttcttctctcctctga

SEQ ID NO: 4033 - DNA, 38 bp, Artificial Sequence
  Synthetic oligonucleotide
agttggcttgtcatcatttttttgcttatcttctctga

SEQ ID NO: 4034 - DNA, 36 bp, Artificial Sequence
  Synthetic oligonucleotide
atccaaacgatcaccttggtctctctttacttttca

SEQ ID NO: 4035 - DNA, 35 bp, Artificial Sequence
  Synthetic oligonucleotide
atccttatttctatctcatcctcttgtcgccgact

SEQ ID NO: 4036 - DNA, 35 bp, Artificial Sequence
  Synthetic oligonucleotide
atcgaaggtactacgtaaatttctcattctctttt

SEQ ID NO: 4037 - DNA, 35 bp, Artificial Sequence
  Synthetic oligonucleotide
atggtctgtcatggcaccgattacatttctttctc

SEQ ID NO: 4038 - DNA, 35 bp, Artificial Sequence
  Synthetic oligonucleotide
atgtgctcttcgttatttctcttatttctatcttt

SEQ ID NO: 4039 - DNA, 35 bp, Artificial Sequence
  Synthetic oligonucleotide
attacttctgctccattttccttttttcatacatt

SEQ ID NO: 4040 - DNA, 35 bp, Artificial Sequence
  Synthetic oligonucleotide
attcctgcgttgcgtatcttccttcgcttattttc

SEQ ID NO: 4041 - DNA, 37 bp, Artificial Sequence
  Synthetic oligonucleotide
ccccactatttatccgcacatcttttgttctctttga

SEQ ID NO: 4042 - DNA, 35 bp, Artificial Sequence
  Synthetic oligonucleotide
cctccgccttactttcttatttctctttacgaatt

SEQ ID NO: 4043 - DNA, 35 bp, Artificial Sequence
  Synthetic oligonucleotide
cgaggaccgacttttccacttatctttgccctttt

SEQ ID NO: 4044 - DNA, 37 bp, Artificial Sequence
  Synthetic oligonucleotide
ctccatcgaactctatctctttttcttaacaatccga

SEQ ID NO: 4045 - DNA, 36 bp, Artificial Sequence
  Synthetic oligonucleotide
gagtacctcacaattttcccgcgacgccctttttta

SEQ ID NO: 4046 - DNA, 37 bp, Artificial Sequence
  Synthetic oligonucleotide
gatcccgttccttttttaacgctctattttcttttga

SEQ ID NO: 4047 - DNA, 35 bp, Artificial Sequence
  Synthetic oligonucleotide
gcaaatgcctttcattacccattgcttttctgaca

SEQ ID NO: 4048 - DNA, 36 bp, Artificial Sequence
  Synthetic oligonucleotide
gcaatgaacacctacacatacctgcctacacgatta

SEQ ID NO: 4049 - DNA, 36 bp, Artificial Sequence
  Synthetic oligonucleotide
gcaatttttcattcttagggtttctctcacttccca

SEQ ID NO: 4050 - DNA, 38 bp, Artificial Sequence
  Synthetic oligonucleotide
gcacatttcttaacttttctgtttggatttaccaatga

SEQ ID NO: 4051 - DNA, 37 bp, Artificial Sequence
  Synthetic oligonucleotide
gcacggcttacgctcttcttttccgctatctatttga

SEQ ID NO: 4052 - DNA, 36 bp, Artificial Sequence
  Synthetic oligonucleotide
gcagttcgcctccactcactcttttccgatttatca

SEQ ID NO: 4053 - DNA, 35 bp, Artificial Sequence
  Synthetic oligonucleotide
gcatcctcccgtgtcgctcacttttcctttgcttc

SEQ ID NO: 4054 - DNA, 38 bp, Artificial Sequence
  Synthetic oligonucleotide
gccaactttgaatgggctctcatcctatctctctttga

SEQ ID NO: 4055 - DNA, 36 bp, Artificial Sequence
  Synthetic oligonucleotide
gcccgcgctcgcatcctatttcttctttttttgtaa

SEQ ID NO: 4056 - DNA, 35 bp, Artificial Sequence
  Synthetic oligonucleotide
gccctcgtactcttctttggaacttactttcattt

SEQ ID NO: 4057 - DNA, 37 bp, Artificial Sequence
  Synthetic oligonucleotide
gccgcattatttcgttttttcttcactctgcacttga

SEQ ID NO: 4058 - DNA, 38 bp, Artificial Sequence
  Synthetic oligonucleotide
gcctatcttactatatctcgtttactttccttatatga

SEQ ID NO: 4059 - DNA, 37 bp, Artificial Sequence
  Synthetic oligonucleotide
gcctgtacctgtttacttttatcaatcttgtgcttga

SEQ ID NO: 4060 - DNA, 36 bp, Artificial Sequence
  Synthetic oligonucleotide
gccttccgcttggtgttttttttacttttagatcta

SEQ ID NO: 4061 - DNA, 35 bp, Artificial Sequence
  Synthetic oligonucleotide
gcgatggtctaccttcttttaacaaattttcgctc

SEQ ID NO: 4062 - DNA, 38 bp, Artificial Sequence
  Synthetic oligonucleotide
gcgccttacgttaattcacatatccctttaccatctga

SEQ ID NO: 4063 - DNA, 38 bp, Artificial Sequence
  Synthetic oligonucleotide
gcggtctgggaatttctaccctgcttctatctttttga

SEQ ID NO: 4064 - DNA, 35 bp, Artificial Sequence
  Synthetic oligonucleotide
gctacgccttactctctgataatctccactttccg

SEQ ID NO: 4065 - DNA, 35 bp, Artificial Sequence
  Synthetic oligonucleotide
gctatctgagctcccgctttctttcgattatatat

SEQ ID NO: 4066 - DNA, 35 bp, Artificial Sequence
  Synthetic oligonucleotide
ggcccgatttcctatgtcatttggttttttctttc

SEQ ID NO: 4067 - DNA, 35 bp, Artificial Sequence
  Synthetic oligonucleotide
ggccgtcgcatacctagatttctttatcctttttc

SEQ ID NO: 4068 - DNA, 38 bp, Artificial Sequence
  Synthetic oligonucleotide
ggcgccaatttccttctatcgcaattcatttcctctga

SEQ ID NO: 4069 - DNA, 36 bp, Artificial Sequence
  Synthetic oligonucleotide
ggctaggccgccttcttatctttatgcccttgttaa

SEQ ID NO: 4070 - DNA, 35 bp, Artificial Sequence
  Synthetic oligonucleotide
ggcttcttatttgcttgaatatccgcttcctctat

SEQ ID NO: 4071 - DNA, 36 bp, Artificial Sequence
  Synthetic oligonucleotide
gggcacggttttttcttttctggtcgctatccctta

SEQ ID NO: 4072 - DNA, 35 bp, Artificial Sequence
  Synthetic oligonucleotide
ggtaccctgattttttctcgcctattttaatattt

SEQ ID NO: 4073 - DNA, 35 bp, Artificial Sequence
  Synthetic oligonucleotide
ggtccaattacccttttcaacttatcgcaccattt

SEQ ID NO: 4074 - DNA, 36 bp, Artificial Sequence
  Synthetic oligonucleotide
gtttcgtggtatgcgaaccttctattacttatttta

SEQ ID NO: 4075 - DNA, 35 bp, Artificial Sequence
  Synthetic oligonucleotide
gttttcttcccggttaaccctttattttttttggt

SEQ ID NO: 4076 - DNA, 38 bp, Artificial Sequence
  Synthetic oligonucleotide
tacactttctctagttactactcaccttctttctctga

SEQ ID NO: 4077 - DNA, 35 bp, Artificial Sequence
  Synthetic oligonucleotide
tagttacttttaatcaatactctctatttttttgc

SEQ ID NO: 4078 - DNA, 35 bp, Artificial Sequence
  Synthetic oligonucleotide
tatccttcgcattattctttctcatcggtccttta

SEQ ID NO: 4079 - DNA, 35 bp, Artificial Sequence
  Synthetic oligonucleotide
tatctttattgctctgggtgattgcctcttgtttt

SEQ ID NO: 4080 - DNA, 35 bp, Artificial Sequence
  Synthetic oligonucleotide
tatttcccacgctattcatctattctctttacctt

SEQ ID NO: 4081 - DNA, 36 bp, Artificial Sequence
  Synthetic oligonucleotide
tccactggcttggcattgcctccttgatccttctta

SEQ ID NO: 4082 - DNA, 35 bp, Artificial Sequence
  Synthetic oligonucleotide
tccagcacgcaacctcagcttcatctttttctctt

SEQ ID NO: 4083 - DNA, 35 bp, Artificial Sequence
  Synthetic oligonucleotide
tccatttgtactgtgcgcctaattttctactcttt

SEQ ID NO: 4084 - DNA, 35 bp, Artificial Sequence
  Synthetic oligonucleotide
tccgacctggttatttttttgcctttttctattat

SEQ ID NO: 4085 - DNA, 36 bp, Artificial Sequence
  Synthetic oligonucleotide
tcgcgatttcccatgtctctatacttcttacaccca

SEQ ID NO: 4086 - DNA, 35 bp, Artificial Sequence
  Synthetic oligonucleotide
tcgtacgagatgcactctttctacttaagttttct

SEQ ID NO: 4087 - DNA, 37 bp, Artificial Sequence
  Synthetic oligonucleotide
tcgtcattgccttcctttttcatgtttcattttctga

SEQ ID NO: 4088 - DNA, 35 bp, Artificial Sequence
  Synthetic oligonucleotide
tcgtgatctctatttggtttcttccacgcatttct

SEQ ID NO: 4089 - DNA, 36 bp, Artificial Sequence
  Synthetic oligonucleotide
tcgttctatccgtttgtgcatcttccttctttacca

SEQ ID NO: 4090 - DNA, 35 bp, Artificial Sequence
  Synthetic oligonucleotide
tctaggcatctccgcttcctaaatttctttctgta

SEQ ID NO: 4091 - DNA, 35 bp, Artificial Sequence
  Synthetic oligonucleotide
tctgcccgcactactaaatttttatctcttcacta

SEQ ID NO: 4092 - DNA, 36 bp, Artificial Sequence
  Synthetic oligonucleotide
tctttagcatctcatcttttctgccctcacgcctta

SEQ ID NO: 4093 - DNA, 35 bp, Artificial Sequence
  Synthetic oligonucleotide
tgcacgaggattaccttttctttttctcgattctt

SEQ ID NO: 4094 - DNA, 36 bp, Artificial Sequence
  Synthetic oligonucleotide
tgcttatcccgggaatatcctttgctctcttttcca

SEQ ID NO: 4095 - DNA, 38 bp, Artificial Sequence
  Synthetic oligonucleotide
tggctctcacgtctccattttattttctatttttctga

SEQ ID NO: 4096 - DNA, 37 bp, Artificial Sequence
  Synthetic oligonucleotide
tggggcttaaccatctcttctttctcttttaccagga

SEQ ID NO: 4097 - DNA, 36 bp, Artificial Sequence
  Synthetic oligonucleotide
tggtactaacctctatctcatcctaaaatctcttta

SEQ ID NO: 4098 - DNA, 35 bp, Artificial Sequence
  Synthetic oligonucleotide
tgtcgacctttaccttattcatttgaaatcgcttt

SEQ ID NO: 4099 - DNA, 36 bp, Artificial Sequence
  Synthetic oligonucleotide
ttccttgcaatttcctttctttttattcatccggca

SEQ ID NO: 4100 - DNA, 37 bp, Artificial Sequence
  Synthetic oligonucleotide
ttcgacccttttccatactttttctcacgcaaattga

SEQ ID NO: 4101 - DNA, 38 bp, Artificial Sequence
  Synthetic oligonucleotide
ttctcgatcctttgccgcatttctcacttttctgttga

SEQ ID NO: 4102 - DNA, 36 bp, Artificial Sequence
  Synthetic oligonucleotide
ttctcgtagctacaaatcctttaacacttctcttca

SEQ ID NO: 4103 - DNA, 38 bp, Artificial Sequence
  Synthetic oligonucleotide
ttgcgacgcctctactttcaccccactaaaatttctga

SEQ ID NO: 4104 - DNA, 35 bp, Artificial Sequence
  Synthetic oligonucleotide
ttgtacgttcgctttattttgcattccgccttttt

SEQ ID NO: 4105 - DNA, 37 bp, Artificial Sequence
  Synthetic oligonucleotide
tttcctcgctatttctgtctctttgcccttcttggga

SEQ ID NO: 4106 - DNA, 37 bp, Artificial Sequence
  Synthetic oligonucleotide
ttttcaggtacgaccccatacttttttttcattttga

SEQ ID NO: 4107 - DNA, 35 bp, Artificial Sequence
  Synthetic oligonucleotide
aacgccgtacagttgctgatttcacccactctttt

SEQ ID NO: 4108 - DNA, 35 bp, Artificial Sequence
  Synthetic oligonucleotide
actccttctaaaattacacttatatcacccatacc

SEQ ID NO: 4109 - DNA, 35 bp, Artificial Sequence
  Synthetic oligonucleotide
agaaccgtccctgcatttttattggttattttttt

SEQ ID NO: 4110 - DNA, 38 bp, Artificial Sequence
  Synthetic oligonucleotide
cttgcatattgttcttcctgtttgctttttcttcttga

SEQ ID NO: 4111 - DNA, 35 bp, Artificial Sequence
  Synthetic oligonucleotide
gagtaccctattacgctccccccccattatctctt

SEQ ID NO: 4112 - DNA, 38 bp, Artificial Sequence
  Synthetic oligonucleotide
gcaccttctattttcaccccgatttaccctttgcctga

SEQ ID NO: 4113 - DNA, 38 bp, Artificial Sequence
  Synthetic oligonucleotide
gccgccttgggtccattattatctttatatttttctga

SEQ ID NO: 4114 - DNA, 38 bp, Artificial Sequence
  Synthetic oligonucleotide
gccgcttgcctttatttatcatacgctattaatcttga

SEQ ID NO: 4115 - DNA, 35 bp, Artificial Sequence
  Synthetic oligonucleotide
gcctggttatctttgaatagctttcgtattccttt

SEQ ID NO: 4116 - DNA, 36 bp, Artificial Sequence
  Synthetic oligonucleotide
gccttgcatcttcacttatggtgtcttaccacttta

SEQ ID NO: 4117 - DNA, 35 bp, Artificial Sequence
  Synthetic oligonucleotide
gcgaggctattatctctggcgctgttcgcccactt

SEQ ID NO: 4118 - DNA, 37 bp, Artificial Sequence
  Synthetic oligonucleotide
gctagcatgcactcctttacttcttctcatcacacga

SEQ ID NO: 4119 - DNA, 37 bp, Artificial Sequence
  Synthetic oligonucleotide
gttcaacttatcttcctttttctttctgggactggga

SEQ ID NO: 4120 - DNA, 35 bp, Artificial Sequence
  Synthetic oligonucleotide
taccgctccactcttctttattttcggtatctttc

SEQ ID NO: 4121 - DNA, 35 bp, Artificial Sequence
  Synthetic oligonucleotide
tctagccgtcactattcttcgtacgtttccatcct

SEQ ID NO: 4122 - DNA, 38 bp, Artificial Sequence
  Synthetic oligonucleotide
tctcactactcgctctttttccttttctccacttatga

SEQ ID NO: 4123 - DNA, 35 bp, Artificial Sequence
  Synthetic oligonucleotide
tcttacctaatttcttactctgccactttacacgc

SEQ ID NO: 4124 - DNA, 38 bp, Artificial Sequence
  Synthetic oligonucleotide
tggtacgtactcgcgccgcggtctttttcttttcctga

SEQ ID NO: 4125 - DNA, 36 bp, Artificial Sequence
  Synthetic oligonucleotide
ttttacttacccataatttccttacattactttata

SEQ ID NO: 4126 - DNA, 36 bp, Artificial Sequence
  Synthetic oligonucleotide
aaatagctcgcacgagtagccccgatagaaacataa

SEQ ID NO: 4127 - DNA, 37 bp, Artificial Sequence
  Synthetic oligonucleotide
aatcaaatcatacaatagagaccgaaattacaaccga

SEQ ID NO: 4128 - DNA, 36 bp, Artificial Sequence
  Synthetic oligonucleotide
acaggcttggttcaacgaaaatcttcagttccggaa

SEQ ID NO: 4129 - DNA, 35 bp, Artificial Sequence
  Synthetic oligonucleotide
accctggggtgtccgggataaaaatatacaaatca

SEQ ID NO: 4130 - DNA, 36 bp, Artificial Sequence
  Synthetic oligonucleotide
agagaataaaatgggggctagaagctaaaaatataa

SEQ ID NO: 4131 - DNA, 38 bp, Artificial Sequence
  Synthetic oligonucleotide
cgtgcacattctaacggaatcagtaccacacaccatga

SEQ ID NO: 4132 - DNA, 35 bp, Artificial Sequence
  Synthetic oligonucleotide
ctgcttaaaactatcccataatcctaatgaccgga

SEQ ID NO: 4133 - DNA, 36 bp, Artificial Sequence
  Synthetic oligonucleotide
gaatgatttacaccacaattagactactgatatcaa

SEQ ID NO: 4134 - DNA, 37 bp, Artificial Sequence
  Synthetic oligonucleotide
gagttgctgcaagggactccctgaacacttatgacga

SEQ ID NO: 4135 - DNA, 37 bp, Artificial Sequence
  Synthetic oligonucleotide
gcgccgaatagttcgacccgaaaccctaatgaatcga

SEQ ID NO: 4136 - DNA, 38 bp, Artificial Sequence
  Synthetic oligonucleotide
gggctgtgcaaacacaatatataaaaactcaacattga

SEQ ID NO: 4137 - DNA, 35 bp, Artificial Sequence
  Synthetic oligonucleotide
ggtctgcccctgaccgactcaaccgattaagaaca

SEQ ID NO: 4138 - DNA, 35 bp, Artificial Sequence
  Synthetic oligonucleotide
taaaacgaaactaggaaagatacacctaaaaagaa

SEQ ID NO: 4139 - DNA, 35 bp, Artificial Sequence
  Synthetic oligonucleotide
tactaacaacgggtagaccgacgaatacccacaca

SEQ ID NO: 4140 - DNA, 38 bp, Artificial Sequence
  Synthetic oligonucleotide
tactggagggctacaacctgctacatagatacacatga

SEQ ID NO: 4141 - DNA, 37 bp, Artificial Sequence
  Synthetic oligonucleotide
tataacgccctaacatattgactacgagagactggga

SEQ ID NO: 4142 - DNA, 36 bp, Artificial Sequence
  Synthetic oligonucleotide
tcaatatcccgtcctcggggctagttatagtctaaa

SEQ ID NO: 4143 - DNA, 37 bp, Artificial Sequence
  Synthetic oligonucleotide
tcccataataaaccctatcaagtgtagacaaacatga

SEQ ID NO: 4144 - DNA, 37 bp, Artificial Sequence
  Synthetic oligonucleotide
tcgaacccgccacaaaatacttaagtcagtcaacaga

SEQ ID NO: 4145 - DNA, 35 bp, Artificial Sequence
  Synthetic oligonucleotide
tcgcattcccgacaaaatatatactggactacttc

SEQ ID NO: 4146 - DNA, 36 bp, Artificial Sequence
  Synthetic oligonucleotide
tgaaccgttatattaccaaattagagcttagaaata

SEQ ID NO: 4147 - DNA, 38 bp, Artificial Sequence
  Synthetic oligonucleotide
tgacatactataaccggggccattaataatacacatga

SEQ ID NO: 4148 - DNA, 36 bp, Artificial Sequence
  Synthetic oligonucleotide
tgcaacgtaaaacacacaaactctaatgataccgga

SEQ ID NO: 4149 - DNA, 36 bp, Artificial Sequence
  Synthetic oligonucleotide
tgcgacaacagccattcgggaactacccgatcacca

SEQ ID NO: 4150 - DNA, 36 bp, Artificial Sequence
  Synthetic oligonucleotide
ttccggctataatacaaacatatcacccgacttgaa

SEQ ID NO: 4151 - DNA, 7 bp, Artificial Sequence
  Synthetic oligonucleotide
acaatcc

SEQ ID NO: 4152 - DNA, 38 bp, Artificial Sequence
  Synthetic oligonucleotide
actatagaacaatccaccgctttaaatcaactatctga

SEQ ID NO: 4153 - DNA, 38 bp, Artificial Sequence
  Synthetic oligonucleotide
actatagaacaatccaccgctttaaatcaactatctca

SEQ ID NO: 4154 - DNA, 38 bp, Artificial Sequence
  Synthetic oligonucleotide
actatagaacaatccaccgctttaaatcaactatctaa

SEQ ID NO: 4155 - DNA, 38 bp, Artificial Sequence
  Synthetic oligonucleotide
actatagaacaatccaccgctttaaataaactatctga

SEQ ID NO: 4156 - DNA, 38 bp, Artificial Sequence
  Synthetic oligonucleotide
actatagaacaatccacctctttaaatcaactatctga

SEQ ID NO: 4157 - DNA, 38 bp, Artificial Sequence
  Synthetic oligonucleotide
actatagaacaatccaccgctttaaatcaactatccga

SEQ ID NO: 4158 - DNA, 38 bp, Artificial Sequence
  Synthetic oligonucleotide
aatatagaacaatccaccgctttaaatcaactatctga

SEQ ID NO: 4159 - DNA, 38 bp, Artificial Sequence
  Synthetic oligonucleotide
actatagaacaatccaccgctttaaatcaactatccta

SEQ ID NO: 4160 - DNA, 38 bp, Artificial Sequence
  Synthetic oligonucleotide
actatagaacaatccacctctttaaatcaactatctta

SEQ ID NO: 4161 - DNA, 38 bp, Artificial Sequence
  Synthetic oligonucleotide
actatagaacaatcccccgctttaaatcaactatctga

SEQ ID NO: 4162 - DNA, 38 bp, Artificial Sequence
  Synthetic oligonucleotide
actatagaacaatccgccgctttaaatcaactatctga

SEQ ID NO: 4163 - DNA, 38 bp, Artificial Sequence
  Synthetic oligonucleotide
actatagaacaatcctccgctttaaatcaactatctga

SEQ ID NO: 4164 - DNA, 38 bp, Artificial Sequence
  Synthetic oligonucleotide
actatataacaatccaccgctttaaatcaactatctga

SEQ ID NO: 4165 - DNA, 38 bp, Artificial Sequence
  Synthetic oligonucleotide
tacccctgacaatcctcgcgccgaggcctccatcctaa

SEQ ID NO: 4166 - DNA, 38 bp, Artificial Sequence; identical to SEQ ID NO: 4165
  Synthetic oligonucleotide

SEQ ID NO: 4167 - DNA, 36 bp, Artificial Sequence
  Synthetic oligonucleotide
gattttaaaacccttgcacctgattgtgccaatcaa

SEQ ID NO: 4168 - DNA, 36 bp, Artificial Sequence
  Synthetic oligonucleotide
gattttaaaacccttgcacctgattgtgccaatcga

SEQ ID NO: 4169 - DNA, 36 bp, Artificial Sequence
  Synthetic oligonucleotide
gattttaaaacccttgcacctgattgtgccaatcta

SEQ ID NO: 4170 - DNA, 36 bp, Artificial Sequence
  Synthetic oligonucleotide
aacccaattcacatacactctcaccctcactaaaca

SEQ ID NO: 4171 - DNA, 36 bp, Artificial Sequence
  Synthetic oligonucleotide
aacccaattcacatacactctcaccctcactaaaaa

SEQ ID NO: 4172 - DNA, 36 bp, Artificial Sequence
  Synthetic oligonucleotide
aacccaattcacatacactctcaccctcactaaaga

SEQ ID NO: 4173 - DNA, 36 bp, Artificial Sequence
  Synthetic oligonucleotide
aacccaattcacatacactctcaccctcactaaata

SEQ ID NO: 4174 - DNA, 36 bp, Artificial Sequence
  Synthetic oligonucleotide
aacccaattcacatacactctcaccctcactaacca

SEQ ID NO: 4175 - DNA, 36 bp, Artificial Sequence
  Synthetic oligonucleotide
aacccaattcacatacactctcaccctcactaacaa

SEQ ID NO: 4176 - DNA, 36 bp, Artificial Sequence
  Synthetic oligonucleotide
aacccaattcacatacactctctccctcactaaaca

SEQ ID NO: 4177 - DNA, 36 bp, Artificial Sequence
  Synthetic oligonucleotide
aacccaattcacatacactctccccctcactaaaca

SEQ ID NO: 4178 - DNA, 36 bp, Artificial Sequence
  Synthetic oligonucleotide
aacccaattcacatacactctcgccctcactaaaca

SEQ ID NO: 4179 - DNA, 36 bp, Artificial Sequence; identical to SEQ ID NO: 2056
  Synthetic oligonucleotide

SEQ ID NO: 4180 - DNA, 36 bp, Artificial Sequence
  Synthetic oligonucleotide
aacccaattcacataaactctcaccctcactaaaca

SEQ ID NO: 4181 - DNA, 36 bp, Artificial Sequence
  Synthetic oligonucleotide
aacccaatccacatacactctcaccctcactaaaca

SEQ ID NO: 4182 - DNA, 36 bp, Artificial Sequence
  Synthetic oligonucleotide
aacccaattcacatacactctcaccctcactaaacc

SEQ ID NO: 4183 - DNA, 36 bp, Artificial Sequence
  Synthetic oligonucleotide
aacccaattcacatacgctctcaccctcactaaaca

SEQ ID NO: 4184 - DNA, 36 bp, Artificial Sequence
  Synthetic oligonucleotide
aacccaattcacatacactctctccctcactaaaaa

SEQ ID NO: 4185 - DNA, 36 bp, Artificial Sequence
  Synthetic oligonucleotide
aacccaattcacataccctctcaccctcactaaaca

SEQ ID NO: 4186 - DNA, 36 bp, Artificial Sequence
  Synthetic oligonucleotide
aacccaattcacatacactctcgccctcactaaaaa

SEQ ID NO: 4187 - DNA, 36 bp, Artificial Sequence
  Synthetic oligonucleotide
aacccaattcacatacactcttaccctcactaaaca

SEQ ID NO: 4188 - DNA, 36 bp, Artificial Sequence
  Synthetic oligonucleotide
aacccaatacacatacactctcaccctcactaaaca

SEQ ID NO: 4189 - DNA, 36 bp, Artificial Sequence
  Synthetic oligonucleotide
aacccaattcacatacactctcaccctctctaaaca

SEQ ID NO: 4190 - DNA, 36 bp, Artificial Sequence
  Synthetic oligonucleotide
aacccaattcacatacactctccccctcactaaaaa

SEQ ID NO: 4191 - DNA, 36 bp, Artificial Sequence
  Synthetic oligonucleotide
aacccaattcacataccctctcaccctcactaaaaa

SEQ ID NO: 4192 - DNA, 36 bp, Artificial Sequence
  Synthetic oligonucleotide
aacccaattcacatacactctcaccctcactaaact

SEQ ID NO: 4193 - DNA, 36 bp, Artificial Sequence
  Synthetic oligonucleotide
aacccaattcacatacaccctcaccctcactaaaca

SEQ ID NO: 4194 - DNA, 36 bp, Artificial Sequence
  Synthetic oligonucleotide
aacccaattcacatactctctcaccctcactaaaaa

SEQ ID NO: 4195 - DNA, 36 bp, Artificial Sequence
  Synthetic oligonucleotide
aacccaatgcacatacactctcaccctcactaaaca

SEQ ID NO: 4196 - DNA, 36 bp, Artificial Sequence
  Synthetic oligonucleotide
agcccaattcacatacactctcaccctcactaaaca

SEQ ID NO: 4197 - DNA, 36 bp, Artificial Sequence
  Synthetic oligonucleotide
aacccaattcacatacactctaaccctcactaaaca

SEQ ID NO: 4198 - DNA, 36 bp, Artificial Sequence
  Synthetic oligonucleotide
aacccaaatcacatacactctcaccctcactaaaca

SEQ ID NO: 4199 - DNA, 36 bp, Artificial Sequence
  Synthetic oligonucleotide
aacccaattcacatacactctcaccctcactaaaat

SEQ ID NO: 4200 - DNA, 36 bp, Artificial Sequence
  Synthetic oligonucleotide
aacccaattcacatacactctctccctcactaaaga

SEQ ID NO: 4201 - DNA, 36 bp, Artificial Sequence
  Synthetic oligonucleotide
aacccaattctcatacactctcaccctcactaaaca

SEQ ID NO: 4202 - DNA, 36 bp, Artificial Sequence; identical to SEQ ID NO: 1884
  Synthetic oligonucleotide

SEQ ID NO: 4203 - DNA, 36 bp, Artificial Sequence
  Synthetic oligonucleotide
aacccaactcacatacactctcaccctcactaaaca

SEQ ID NO: 4204 - DNA, 36 bp, Artificial Sequence
  Synthetic oligonucleotide
aacccaattcacatacactctcaccctcactaaaac

SEQ ID NO: 4205 - DNA, 36 bp, Artificial Sequence
  Synthetic oligonucleotide
aacccaattcacatacactctcaccctcactaacta

SEQ ID NO: 4206 - DNA, 36 bp, Artificial Sequence
  Synthetic oligonucleotide
aacccaattcacatacactctcgccctcactaaaga

SEQ ID NO: 4207 - DNA, 36 bp, Artificial Sequence
  Synthetic oligonucleotide
aacccaattcacattcactctcaccctcactaaaca

SEQ ID NO: 4208 - DNA, 36 bp, Artificial Sequence
  Synthetic oligonucleotide
aaccaaattcacatacactctcaccctcactaaaca

SEQ ID NO: 4209 - DNA, 36 bp, Artificial Sequence
  Synthetic oligonucleotide
aacccaattcacataaactctcaccctcactaaaaa

SEQ ID NO: 4210 - DNA, 36 bp, Artificial Sequence
  Synthetic oligonucleotide
aacccaattcacatacacgctcaccctcactaaaca

SEQ ID NO: 4211 - DNA, 36 bp, Artificial Sequence
  Synthetic oligonucleotide
aacccaattcacatacactctcacactcactaaaca

SEQ ID NO: 4212 - DNA, 36 bp, Artificial Sequence
  Synthetic oligonucleotide
aacccaattcacatacactctcaccatcactaaaca

SEQ ID NO: 4213 - DNA, 36 bp, Artificial Sequence
  Synthetic oligonucleotide
aacccaattcacatacactctcaccctcactaacga

SEQ ID NO: 4214 - DNA, 36 bp, Artificial Sequence
  Synthetic oligonucleotide
aacccaattcacatacactctcaccctcgctaaaca

SEQ ID NO: 4215 - DNA, 36 bp, Artificial Sequence
  Synthetic oligonucleotide
aacccaattcacatacactctccccctcactaaaga

SEQ ID NO: 4216 - DNA, 36 bp, Artificial Sequence
  Synthetic oligonucleotide
aacccaattcgcatacactctcaccctcactaaaca

SEQ ID NO: 4217 - DNA, 36 bp, Artificial Sequence
  Synthetic oligonucleotide
aacccaattcacatacactcacaccctcactaaaca

SEQ ID NO: 4218 - DNA, 36 bp, Artificial Sequence
  Synthetic oligonucleotide
aacccaattcacatacactcccaccctcactaaaca

SEQ ID NO: 4219 - DNA, 36 bp, Artificial Sequence
  Synthetic oligonucleotide
aacccaattcacatacactctcaccctcactaaacg

SEQ ID NO: 4220 - DNA, 36 bp, Artificial Sequence
  Synthetic oligonucleotide
aacccaattcacatactctctcaccctcactaaaga

SEQ ID NO: 4221 - DNA, 36 bp, Artificial Sequence
  Synthetic oligonucleotide
aacccaattcacatactctctcaccctcactaaata

SEQ ID NO: 4222 - DNA, 36 bp, Artificial Sequence
  Synthetic oligonucleotide
aacccagttcacatacactctcaccctcactaaaca

SEQ ID NO: 4223 - DNA, 36 bp, Artificial Sequence
  Synthetic oligonucleotide
aaaccaattcacatacactctcaccctcactaaaca

SEQ ID NO: 4224 - DNA, 36 bp, Artificial Sequence
  Synthetic oligonucleotide
aacacaattcacatacactctcaccctcactaaaca

SEQ ID NO: 4225 - DNA, 36 bp, Artificial Sequence
  Synthetic oligonucleotide
aacccaactcacatacactctcaccctcactaaaaa

SEQ ID NO: 4226 - DNA, 36 bp, Artificial Sequence
  Synthetic oligonucleotide
aacccaagtcacatacactctcaccctcactaaaca

SEQ ID NO: 4227 - DNA, 36 bp, Artificial Sequence
  Synthetic oligonucleotide
aacccaatccacatacactctcaccctcactaaaaa

SEQ ID NO: 4228 - DNA, 36 bp, Artificial Sequence
  Synthetic oligonucleotide
aacccaattaacatacactctcaccctcactaaaca

SEQ ID NO: 4229 - DNA, 36 bp, Artificial Sequence
  Synthetic oligonucleotide
aacccaattcacaaacactctcaccctcactaaaca

SEQ ID NO: 4230 - DNA, 36 bp, Artificial Sequence
  Synthetic oligonucleotide
aacccaattcacacacactctcacccccactaaaca

SEQ ID NO: 4231 - DNA, 36 bp, Artificial Sequence
  Synthetic oligonucleotide
aacccaattcacacacactctcaccctcactaaaca

SEQ ID NO: 4232 - DNA, 36 bp, Artificial Sequence
  Synthetic oligonucleotide
aacccaattcacacacactctccccctcactaaaca

SEQ ID NO: 4233 - DNA, 36 bp, Artificial Sequence
  Synthetic oligonucleotide
aacccaattcacagacactctcaccctcactaaaca

SEQ ID NO: 4234 - DNA, 36 bp, Artificial Sequence
  Synthetic oligonucleotide
aacccaattcacatacaatctcaccctcactaaaca

SEQ ID NO: 4235 - DNA, 36 bp, Artificial Sequence
  Synthetic oligonucleotide
aacccaattcacatacacactcaccctcactaaaca

SEQ ID NO: 4236 - DNA, 36 bp, Artificial Sequence
  Synthetic oligonucleotide
aacccaattcacatacaccctcaccctcactaaaaa

SEQ ID NO: 4237 - DNA, 36 bp, Artificial Sequence
  Synthetic oligonucleotide
aacccaattcacatacactatcaccctcactaaaaa

SEQ ID NO: 4238 - DNA, 36 bp, Artificial Sequence
  Synthetic oligonucleotide
aacccaattcacatacactatcaccctcactaaaca

SEQ ID NO: 4239 - DNA, 36 bp, Artificial Sequence
  Synthetic oligonucleotide
aacccaattcacatacactcccaccctcactaaaaa

SEQ ID NO: 4240 - DNA, 36 bp, Artificial Sequence
  Synthetic oligonucleotide
aacccaattcacatacactcgcaccctcactaaaca

SEQ ID NO: 4241 - DNA, 36 bp, Artificial Sequence
  Synthetic oligonucleotide
aacccaattcacatacactctcaacctcactaaaca

SEQ ID NO: 4242 - DNA, 36 bp, Artificial Sequence
  Synthetic oligonucleotide
aacccaattcacatacactctcacactcactaaaaa

SEQ ID NO: 4243 - DNA, 36 bp, Artificial Sequence
  Synthetic oligonucleotide
aacccaattcacatacactctcaccatccctaaaca

SEQ ID NO: 4244 - DNA, 36 bp, Artificial Sequence; identical to SEQ ID NO: 2360
  Synthetic oligonucleotide

SEQ ID NO: 4245 - DNA, 36 bp, Artificial Sequence
  Synthetic oligonucleotide
aacccaattcacatacactctcacccgcactaaaca

SEQ ID NO: 4246 - DNA, 36 bp, Artificial Sequence
  Synthetic oligonucleotide
aacccaattcacatacactctcaccctaactaaaca

SEQ ID NO: 4247 - DNA, 36 bp, Artificial Sequence
  Synthetic oligonucleotide
aacccaattcacatacactctcaccctcaataaaca

SEQ ID NO: 4248 - DNA, 36 bp, Artificial Sequence
  Synthetic oligonucleotide
aacccaattcacatacactctcaccctcaccaaaca

SEQ ID NO: 4249 - DNA, 36 bp, Artificial Sequence
  Synthetic oligonucleotide
aacccaattcacatacactctcaccctcactaaaag

SEQ ID NO: 4250 - DNA, 36 bp, Artificial Sequence
  Synthetic oligonucleotide
aacccaattcacatacactctcaccctcactaaagc

SEQ ID NO: 4251 - DNA, 36 bp, Artificial Sequence
  Synthetic oligonucleotide
aacccaattcacatacactctcaccctcactaaagt

SEQ ID NO: 4252 - DNA, 36 bp, Artificial Sequence
  Synthetic oligonucleotide
aacccaattcacatacactctcaccctcactaaatc

SEQ ID NO: 4253 - DNA, 36 bp, Artificial Sequence
  Synthetic oligonucleotide
aacccaattcacatacactctcaccctcactaaatt

SEQ ID NO: 4254 - DNA, 36 bp, Artificial Sequence
  Synthetic oligonucleotide
aacccaattcacatacactctcaccctcactaagaa

SEQ ID NO: 4255 - DNA, 36 bp, Artificial Sequence
  Synthetic oligonucleotide
aacccaattcacatacactctcaccctcactaagca

SEQ ID NO: 4256 - DNA, 36 bp, Artificial Sequence
  Synthetic oligonucleotide
aacccaattcacatacactctcaccctcactaagga

SEQ ID NO: 4257 - DNA, 36 bp, Artificial Sequence
  Synthetic oligonucleotide
aacccaattcacatacactctcaccctcactaagta

SEQ ID NO: 4258 - DNA, 36 bp, Artificial Sequence
  Synthetic oligonucleotide
aacccaattcacatacactctcaccctcactaataa

SEQ ID NO: 4259 - DNA, 36 bp, Artificial Sequence
  Synthetic oligonucleotide
aacccaattcacatacactctcaccctcactaatca

SEQ ID NO: 4260 - DNA, 36 bp, Artificial Sequence
  Synthetic oligonucleotide
aacccaattcacatacactctcaccctcactaatga

SEQ ID NO: 4261 - DNA, 36 bp, Artificial Sequence
  Synthetic oligonucleotide
aacccaattcacatacactctcaccctcactaatta

SEQ ID NO: 4262 - DNA, 36 bp, Artificial Sequence
  Synthetic oligonucleotide
aacccaattcacatacactctcaccctcactacaca

SEQ ID NO: 4263 - DNA, 36 bp, Artificial Sequence
  Synthetic oligonucleotide
aacccaattcacatacactctcaccctcactagaca

SEQ ID NO: 4264 - DNA, 36 bp, Artificial Sequence
  Synthetic oligonucleotide
aacccaattcacatacactctcaccctcactataca

SEQ ID NO: 4265 - DNA, 36 bp, Artificial Sequence
  Synthetic oligonucleotide
aacccaattcacatacactctcaccctcactcaaca

SEQ ID NO: 4266 - DNA, 36 bp, Artificial Sequence
  Synthetic oligonucleotide
aacccaattcacatacactctcaccctcactgaaca

SEQ ID NO: 4267 - DNA, 36 bp, Artificial Sequence
  Synthetic oligonucleotide
aacccaattcacatacactctcaccctcacttaaca

SEQ ID NO: 4268 - DNA, 36 bp, Artificial Sequence
  Synthetic oligonucleotide
aacccaattcacatacactctcaccctcattaaaca

SEQ ID NO: 4269 - DNA, 36 bp, Artificial Sequence
  Synthetic oligonucleotide
aacccaattcacatacactctcaccctccctaaaaa

SEQ ID NO: 4270 - DNA, 36 bp, Artificial Sequence
  Synthetic oligonucleotide
aacccaattcacatacactctcaccctccctaaaca

SEQ ID NO: 4271 - DNA, 36 bp, Artificial Sequence
  Synthetic oligonucleotide
aacccaattcacatacactctcaccctccctaaaga

SEQ ID NO: 4272 - DNA, 36 bp, Artificial Sequence
  Synthetic oligonucleotide
aacccaattcacatacactctcaccctccctaaata

SEQ ID NO: 4273 - DNA, 36 bp, Artificial Sequence
  Synthetic oligonucleotide
aacccaattcacatacactctcaccctcgctaaaaa

SEQ ID NO: 4274 - DNA, 36 bp, Artificial Sequence
  Synthetic oligonucleotide
aacccaattcacatacactctcaccctctctaaaaa

SEQ ID NO: 4275 - DNA, 36 bp, Artificial Sequence
  Synthetic oligonucleotide
aacccaattcacatacactctcaccctgactaaaca

SEQ ID NO: 4276 - DNA, 36 bp, Artificial Sequence
  Synthetic oligonucleotide
aacccaattcacatacactctcacccttactaaaca

SEQ ID NO: 4277 - DNA, 36 bp, Artificial Sequence
  Synthetic oligonucleotide
aacccaattcacatacactctcaccttcactaaaca

SEQ ID NO: 4278 - DNA, 36 bp, Artificial Sequence
  Synthetic oligonucleotide
aacccaattcacatacactctcaccttctctaaaca

SEQ ID NO: 4279 - DNA, 36 bp, Artificial Sequence
  Synthetic oligonucleotide
aacccaattcacatacactctcacgctcactaaaca

SEQ ID NO: 4280 - DNA, 36 bp, Artificial Sequence
  Synthetic oligonucleotide
aacccaattcacatacactctcactctcactaaaaa

SEQ ID NO: 4281 - DNA, 36 bp, Artificial Sequence
  Synthetic oligonucleotide
aacccaattcacatacactctcactctcactaaaca

SEQ ID NO: 4282 - DNA, 36 bp, Artificial Sequence
  Synthetic oligonucleotide
aacccaattcacatacactctcagcctcactaaaca

SEQ ID NO: 4283 - DNA, 36 bp, Artificial Sequence
  Synthetic oligonucleotide
aacccaattcacatacactctcatcctcactaaaca

SEQ ID NO: 4284 - DNA, 36 bp, Artificial Sequence
  Synthetic oligonucleotide
aacccaattcacatacactctccccctcactaaata

SEQ ID NO: 4285 - DNA, 36 bp, Artificial Sequence
  Synthetic oligonucleotide
aacccaattcacatacactctcgccctcactaaata

SEQ ID NO: 4286 - DNA, 36 bp, Artificial Sequence
  Synthetic oligonucleotide
aacccaattcacatacactctctccctcactaaata

SEQ ID NO: 4287 - DNA, 36 bp, Artificial Sequence
  Synthetic oligonucleotide
aacccaattcacatacactgtcaccctcactaaaca

SEQ ID NO: 4288 - DNA, 36 bp, Artificial Sequence
  Synthetic oligonucleotide
aacccaattcacatacactttcaccctcactaaaca

SEQ ID NO: 4289 - DNA, 36 bp, Artificial Sequence
  Synthetic oligonucleotide
aacccaattcacatacattctcaccctcactaaaca

SEQ ID NO: 4290 - DNA, 36 bp, Artificial Sequence
  Synthetic oligonucleotide
aacccaattcacataccctctcaccctcactaaaga

SEQ ID NO: 4291 - DNA, 36 bp, Artificial Sequence
  Synthetic oligonucleotide
aacccaattcacatacgctctcaccctcactaaaaa

SEQ ID NO: 4292 - DNA, 36 bp, Artificial Sequence
  Synthetic oligonucleotide
aacccaattcacatacgctctcaccctcactaaaga

SEQ ID NO: 4293 - DNA, 36 bp, Artificial Sequence
  Synthetic oligonucleotide
aacccaattcacatatactctcaccctcactaaaaa

SEQ ID NO: 4294 - DNA, 36 bp, Artificial Sequence
  Synthetic oligonucleotide
aacccaattcacatatactctcaccctcactaaaca

SEQ ID NO: 4295 - DNA, 36 bp, Artificial Sequence
  Synthetic oligonucleotide
aacccaattcacatccactctcaccctcactaaaca

SEQ ID NO: 4296 - DNA, 36 bp, Artificial Sequence
  Synthetic oligonucleotide
aacccaattcacatgcactctcaccctcactaaaca

SEQ ID NO: 4297 - DNA, 36 bp, Artificial Sequence
  Synthetic oligonucleotide
aacccaattcacctacactctcaccctcactaaaaa

SEQ ID NO: 4298 - DNA, 36 bp, Artificial Sequence
  Synthetic oligonucleotide
aacccaattcacctacactctcaccctcactaaaca

SEQ ID NO: 4299 - DNA, 36 bp, Artificial Sequence
  Synthetic oligonucleotide
aacccaattcacgtacactctcaccctcactaaaca

SEQ ID NO: 4300 - DNA, 36 bp, Artificial Sequence
  Synthetic oligonucleotide
aacccaattcacttacactctcaccctcactaaaca

SEQ ID NO: 4301 - DNA, 36 bp, Artificial Sequence
  Synthetic oligonucleotide
aacccaattcagatacactctcaccctcactaaaca

SEQ ID NO: 4302 - DNA, 36 bp, Artificial Sequence
  Synthetic oligonucleotide
aacccaattcatatacactctcaccctcactaaaaa

SEQ ID NO: 4303 - DNA, 36 bp, Artificial Sequence
  Synthetic oligonucleotide
aacccaattcatatacactctcaccctcactaaaca

SEQ ID NO: 4304 - DNA, 36 bp, Artificial Sequence
  Synthetic oligonucleotide
aacccaattcccatacactctcaccctcactaaaca

SEQ ID NO: 4305 - DNA, 36 bp, Artificial Sequence
  Synthetic oligonucleotide
aacccaatttacatacactctcaccctcactaaaca

SEQ ID NO: 4306 - DNA, 36 bp, Artificial Sequence
  Synthetic oligonucleotide
aacccacttcacatacactctcaccctcactaaaca

SEQ ID NO: 4307 - DNA, 36 bp, Artificial Sequence
  Synthetic oligonucleotide
aacccatttcacatacactctcaccctcactaaaca

SEQ ID NO: 4308 - DNA, 36 bp, Artificial Sequence
  Synthetic oligonucleotide
aaccccattcacatacactctcaccctcactaaaaa

SEQ ID NO: 4309 - DNA, 36 bp, Artificial Sequence
  Synthetic oligonucleotide
aaccccattcacatacactctcaccctcactaaaca

SEQ ID NO: 4310 - DNA, 36 bp, Artificial Sequence
  Synthetic oligonucleotide
aacccgattcacatacactctcaccctcactaaaca

SEQ ID NO: 4311 - DNA, 36 bp, Artificial Sequence
  Synthetic oligonucleotide
aaccctattcacatacactctcaccctcactaaaaa

SEQ ID NO: 4312 - DNA, 36 bp, Artificial Sequence
  Synthetic oligonucleotide
aaccctattcacatacactctcaccctcactaaaca

SEQ ID NO: 4313 - DNA, 36 bp, Artificial Sequence
  Synthetic oligonucleotide
aaccgaattcacatacactctcaccctcactaaaca

SEQ ID NO: 4314 - DNA, 36 bp, Artificial Sequence
  Synthetic oligonucleotide
aacctaattcacatacactctcaccctcactaaaaa

SEQ ID NO: 4315 - DNA, 36 bp, Artificial Sequence
  Synthetic oligonucleotide
aacctaattcacatacactctcaccctcactaaaca

SEQ ID NO: 4316 - DNA, 36 bp, Artificial Sequence
  Synthetic oligonucleotide
aactcaattcacatacactctcaccctcactaaaca

SEQ ID NO: 4317 - DNA, 36 bp, Artificial Sequence
  Synthetic oligonucleotide
aatccaattcacatacactctcaccctcactaaaca

SEQ ID NO: 4318 - DNA, 36 bp, Artificial Sequence
  Synthetic oligonucleotide
accccaattcacatacactctcaccctcactaaaaa

SEQ ID NO: 4319 - DNA, 36 bp, Artificial Sequence
  Synthetic oligonucleotide
accccaattcacatacactctcaccctcactaaaca

SEQ ID NO: 4320 - DNA, 36 bp, Artificial Sequence
  Synthetic oligonucleotide
agcccaattcacatacactctcaccctcactaaaaa

SEQ ID NO: 4321 - DNA, 36 bp, Artificial Sequence
  Synthetic oligonucleotide
atcccaattcacatacactctcaccctcactaaaaa

SEQ ID NO: 4322 - DNA, 36 bp, Artificial Sequence
  Synthetic oligonucleotide
cacccaattcacatacactctcaccctcactaaaaa

SEQ ID NO: 4323 - DNA, 36 bp, Artificial Sequence
  Synthetic oligonucleotide
cacccaattcacatacactctcaccctcactaaaca

SEQ ID NO: 4324 - DNA, 36 bp, Artificial Sequence
  Synthetic oligonucleotide
gacccaattcacatacactctcaccctcactaaaca

SEQ ID NO: 4325 - DNA, 36 bp, Artificial Sequence
  Synthetic oligonucleotide
tacccaattcacatacactctcaccctcactaaaca

SEQ ID NO: 4326 - DNA, 39 bp, Artificial Sequence
  Synthetic oligonucleotide
ttaagatagttgatttaaagcggtggattgttctatagt

SEQ ID NO: 4327 - DNA, 39 bp, Artificial Sequence
  Synthetic oligonucleotide
tactatagatggattgtccgctttaaatcaactatctta

SEQ ID NO: 4328 - DNA, 91 bp, Artificial Sequence
  Synthetic oligonucleotide
ctagcatgactgcagtacgtactatagaacaatccaccgctttaaatcaactatcttactgtctcttatacacatctgacgctgccgacga

SEQ ID NO: 4329 - DNA, 46 bp, Artificial Sequence
  Synthetic oligonucleotide
acgtactatagaacaatccaccgctttaaatcaactatcttactgt

SEQ ID NO: 4330 - DNA, 41 bp, Artificial Sequence
  Synthetic oligonucleotide
gtactatagaacaatccaccgctttaaatcaactatcttac

SEQ ID NO: 4331 - DNA, 91 bp, Artificial Sequence
  Synthetic oligonucleotide
ctagcatgactgcagtacgtacgatagaacaatccaccgctttaaatcaactatcttactgtctcttatacacatctgacgctgccgacga

SEQ ID NO: 4332 - DNA, 46 bp, Artificial Sequence
  Synthetic oligonucleotide
acgtacgatagaacaatccaccgctttaaatcaactatcttactgt

SEQ ID NO: 4333 - DNA, 91 bp, Artificial Sequence
  Synthetic oligonucleotide
ctagcatgactgcagtacgtactatagaacaatccaccgctttaaatcaactatctgactgtctcttatacacatctgacgctgccgacga

SEQ ID NO: 4334 - DNA, 53 bp, Artificial Sequence
  Synthetic oligonucleotide
atagaacaatccaccgctttaaatcaactatctgactgtctcttatacacatc

SEQ ID NO: 4335 - DNA, 89 bp, Artificial Sequence
  Synthetic oligonucleotide
ctagcatgactgcagtacgtaacccaattcacatacactctcacccccactaaacactgtctcttatacacatctgacgctgccgacga

SEQ ID NO: 4336 - DNA, 89 bp, Artificial Sequence
  Synthetic oligonucleotide
ctagcatgactgcagtacgtaacccaattcacatacactctcaccctcactaaacactgtctcttatacacatctgacgctgccgacga

SEQ ID NO: 4337 - DNA, 18 bp, Artificial Sequence
  Synthetic oligonucleotide
gtaacccaattcacatac

SEQ ID NO: 4338 - DNA, 20 bp, Artificial Sequence
  Synthetic oligonucleotide
ggtaacccaattcacatacc

SEQ ID NO: 4339 - DNA, 91 bp, Artificial Sequence
  Synthetic oligonucleotide
ctagcatgactgcagtacgttaagatagttgatttaaagcggtggattgttctatagtctgtctcttatacacatctgacgctgccgacga

SEQ ID NO: 4340 - DNA, 91 bp, Artificial Sequence
  Synthetic oligonucleotide
ctagcatgactgcagtacgttacccctgacaatcctcgcgccgaggcctccatcctgactgtctcttatacacatctgacgctgccgacga

SEQ ID NO: 4341 - DNA, 91 bp, Artificial Sequence
  Synthetic oligonucleotide
ctagcatgactgcagtacgttacccctgacaatcctcgcgccgaggcctccatcctcactgtctcttatacacatctgacgctgccgacga

SEQ ID NO: 4342 - DNA, 89 bp, Artificial Sequence
  Synthetic oligonucleotide
ctagcatgactgcagtacgtgattttaaaacccttgcacctgattgtgccaatccactgtctcttatacacatctgacgctgccgacga

SEQ ID NO: 4343 - protein, 13 aa, Homo sapiens
PGRRGRPGLKGEQ

SEQ ID NO: 4344 - protein, 13 aa, Homo sapiens
RGRPGLKGEQGEP

SEQ ID NO: 4345 - protein, 13 aa, Homo sapiens
KGEQGEPGAPGIR

SEQ ID NO: 4346 - protein, 13 aa, Homo sapiens
QGEPGAPGIRTGI

SEQ ID NO: 4347 - protein, 13 aa, Homo sapiens
TGIQGLKGDQGEP

SEQ ID NO: 4348 - protein, 13 aa, Homo sapiens
KGDQGEPGPSGNP

SEQ ID NO: 4349 - protein, 13 aa, Homo sapiens
DQGEPGPSGNPGK

SEQ ID NO: 4350 - protein, 13 aa, Homo sapiens
PGPSGNPGKVGYP

SEQ ID NO: 4351 - protein, 13 aa, Homo sapiens
PSGNPGKVGYPGP

SEQ ID NO: 4352 - protein, 13 aa, Homo sapiens
PGKVGYPGPSGPL

SEQ ID NO: 4353 - protein, 13 aa, Homo sapiens
KVGYPGPSGPLGA

SEQ ID NO: 4354 - protein, 13 aa, Homo sapiens
KGTKGSPGNIKDQ

SEQ ID NO: 4355 - protein, 13 aa, Homo sapiens
IRRNPPMGGNVVI

SEQ ID NO: 4356 - protein, 13 aa, Homo sapiens
QVVSGGMVLQLQQ

SEQ ID NO: 4357 - DNA, 36 bp, Artificial Sequence
  Synthetic Oligonucleotide
ctaaccccgggtgtggtgggtgggcaggggggttag

SEQ ID NO: 4358 - DNA, 89 bp, Artificial Sequence
  Synthetic Oligonucleotide
ctaaccccgggtgtggtgggtgggcaggggggttagatagaacaatccaccgctttaaatcaactatctgactgtctcttatacacatc

SEQ ID NO: 4359 - DNA, 89 bp, Artificial Sequence
  Synthetic Oligonucleotide
atagaacaatccaccgctttaaatcaactatctgactgtctcttatacacatcctaaccccgggtgtggtgggtgggcaggggggttag

SEQ ID NO: 4360 - DNA, 89 bp, Artificial Sequence
  Synthetic Oligonucleotide
atagaacaattcaccgctttaaatcaactatctgactgtctcttatacacatcctaaccccgggtgtggtgggtgggcaggggggttag

SEQ ID NO: 4361 - DNA, 82 bp, Artificial Sequence
  Synthetic Oligonucleotide
ctaaccccgggtgtggtgggtgggcaggggggttagacgtactatagaacaatccaccgctttaaatcaactatcttactgt

SEQ ID NO: 4362 - DNA, 82 bp, Artificial Sequence
  Synthetic Oligonucleotide
acgtactatagaacaatccaccgctttaaatcaactatcttactgtctaaccccgggtgtggtgggtgggcaggggggttag

SEQ ID NO: 4363 - DNA, 77 bp, Artificial Sequence
  Synthetic Oligonucleotide
ctaaccccgggtgtggtgggtgggcaggggggttaggtactatagaacaatccaccgctttaaatcaactatcttac

SEQ ID NO: 4364 - DNA, 77 bp, Artificial Sequence
  Synthetic Oligonucleotide
gtactatagaacaatccaccgctttaaatcaactatcttacctaaccccgggtgtggtgggtgggcaggggggttag

SEQ ID NO: 4365 - DNA, 82 bp, Artificial Sequence
  Synthetic Oligonucleotide
ctaaccccgggtgtggtgggtgggcaggggggttagacgtacgatagaacaatccaccgctttaaatcaactatcttactgt

SEQ ID NO: 4366 - DNA, 82 bp, Artificial Sequence
  Synthetic Oligonucleotide
acgtacgatagaacaatccaccgctttaaatcaactatcttactgtctaaccccgggtgtggtgggtgggcaggggggttag

SEQ ID NO: 4367 - DNA, 54 bp, Artificial Sequence
  Synthetic Oligonucleotide
ctaaccccgggtgtggtgggtgggcaggggggttaggtaacccaattcacatac

SEQ ID NO: 4368 - DNA, 54 bp, Artificial Sequence
  Synthetic Oligonucleotide
gtaacccaattcacatacctaaccccgggtgtggtgggtgggcaggggggttag

SEQ ID NO: 4369 - DNA, 36 bp, Artificial Sequence
  Synthetic Oligonucleotide
ctaaccccgggtgtggtgggtggacaggggggttag

SEQ ID NO: 4370 - DNA, 26 bp, Artificial Sequence
  Synthetic oligonucleotide
ggtggtggtggttgtggtggtggtgg

SEQ ID NO: 4371 - DNA, 26 bp, Artificial Sequence
  Synthetic Oligonucleotide
cctcctcctccttctcctcctcctcc

SEQ ID NO: 4372 - DNA, 36 bp, Artificial Sequence
  Synthetic Oligonucleotide
  misc_feature (1)..(1): n is a, c, g, or t
ntaaccccgggtgtggtgggtgggcaggggggttag

SEQ ID NO: 4373 - DNA, 36 bp, Artificial Sequence
  Synthetic Oligonucleotide
  misc_feature (2)..(2): n is a, c, g, or t
cnaaccccgggtgtggtgggtgggcaggggggttag

SEQ ID NO: 4374 - DNA, 36 bp, Artificial Sequence
  Synthetic Oligonucleotide
  misc_feature (3)..(3): n is a, c, g, or t
ctnaccccgggtgtggtgggtgggcaggggggttag

SEQ ID NO: 4375 - DNA, 36 bp, Artificial Sequence
  Synthetic Oligonucleotide
  misc_feature (4)..(4): n is a, c, g, or t
ctanccccgggtgtggtgggtgggcaggggggttag

SEQ ID NO: 4376 - DNA, 36 bp, Artificial Sequence
  Synthetic Oligonucleotide
  misc_feature (5)..(5): n is a, c, g, or t
ctaancccgggtgtggtgggtgggcaggggggttag

SEQ ID NO: 4377 - DNA, 36 bp, Artificial Sequence
  Synthetic Oligonucleotide
  misc_feature (6)..(6): n is a, c, g, or t
ctaacnccgggtgtggtgggtgggcaggggggttag

SEQ ID NO: 4378 - DNA, 36 bp, Artificial Sequence
  Synthetic Oligonucleotide
  misc_feature (7)..(7): n is a, c, g, or t
ctaaccncgggtgtggtgggtgggcaggggggttag

SEQ ID NO: 4379 - DNA, 36 bp, Artificial Sequence
  Synthetic Oligonucleotide
  misc_feature (8)..(8): n is a, c, g, or t
ctaacccngggtgtggtgggtgggcaggggggttag

SEQ ID NO: 4380 - DNA, 36 bp, Artificial Sequence
  Synthetic Oligonucleotide
  misc_feature (9)..(9): n is a, c, g, or t
ctaaccccnggtgtggtgggtgggcaggggggttag

SEQ ID NO: 4381 - DNA, 36 bp, Artificial Sequence
  Synthetic Oligonucleotide
  misc_feature (10)..(10): n is a, c, g, or t
ctaaccccgngtgtggtgggtgggcaggggggttag

SEQ ID NO: 4382 - DNA, 36 bp, Artificial Sequence
  Synthetic Oligonucleotide
  misc_feature (11)..(11): n is a, c, g, or t
ctaaccccggntgtggtgggtgggcaggggggttag

SEQ ID NO: 4383 - DNA, 36 bp, Artificial Sequence
  Synthetic Oligonucleotide
  misc_feature (12)..(12): n is a, c, g, or t
ctaaccccgggngtggtgggtgggcaggggggttag

SEQ ID NO: 4384 - DNA, 36 bp, Artificial Sequence
  Synthetic Oligonucleotide
  misc_feature (13)..(13): n is a, c, g, or t
ctaaccccgggtntggtgggtgggcaggggggttag

SEQ ID NO: 4385 - DNA, 36 bp, Artificial Sequence
  Synthetic Oligonucleotide
  misc_feature (14)..(14): n is a, c, g, or t
ctaaccccgggtgnggtgggtgggcaggggggttag

SEQ ID NO: 4386 - DNA, 36 bp, Artificial Sequence
  Synthetic Oligonucleotide
  misc_feature (15)..(15): n is a, c, g, or t
ctaaccccgggtgtngtgggtgggcaggggggttag

SEQ ID NO: 4387 - DNA, 36 bp, Artificial Sequence
  Synthetic Oligonucleotide
  misc_feature (16)..(16): n is a, c, g, or t
ctaaccccgggtgtgntgggtgggcaggggggttag

SEQ ID NO: 4388 - DNA, 36 bp, Artificial Sequence
  Synthetic Oligonucleotide
  misc_feature (17)..(17): n is a, c, g, or t
ctaaccccgggtgtggngggtgggcaggggggttag

SEQ ID NO: 4389 - DNA, 36 bp, Artificial Sequence
  Synthetic Oligonucleotide
  misc_feature (18)..(18): n is a, c, g, or t
ctaaccccgggtgtggtnggtgggcaggggggttag

SEQ ID NO: 4390 - DNA, 36 bp, Artificial Sequence
  Synthetic Oligonucleotide
  misc_feature (19)..(19): n is a, c, g, or t
ctaaccccgggtgtggtgngtgggcaggggggttag

SEQ ID NO: 4391 - DNA, 36 bp, Artificial Sequence
  Synthetic Oligonucleotide
  misc_feature (20)..(20): n is a, c, g, or t
ctaaccccgggtgtggtggntgggcaggggggttag

SEQ ID NO: 4392 - DNA, 36 bp, Artificial Sequence
  Synthetic Oligonucleotide
  misc_feature (21)..(21): n is a, c, g, or t
ctaaccccgggtgtggtgggngggcaggggggttag

SEQ ID NO: 4393 - DNA, 36 bp, Artificial Sequence
  Synthetic Oligonucleotide
  misc_feature (22)..(22): n is a, c, g, or t
ctaaccccgggtgtggtgggtnggcaggggggttag

SEQ ID NO: 4394 - DNA, 36 bp, Artificial Sequence
  Synthetic Oligonucleotide
  misc_feature (23)..(23): n is a, c, g, or t
ctaaccccgggtgtggtgggtgngcaggggggttag

SEQ ID NO: 4395 - DNA, 36 bp, Artificial Sequence
  Synthetic Oligonucleotide
  misc_feature (24)..(24): n is a, c, g, or t
ctaaccccgggtgtggtgggtggncaggggggttag

SEQ ID NO: 4396 - DNA, 36 bp, Artificial Sequence
  Synthetic Oligonucleotide
  misc_feature (25)..(25): n is a, c, g, or t
ctaaccccgggtgtggtgggtgggnaggggggttag

SEQ ID NO: 4397 - DNA, 36 bp, Artificial Sequence
  Synthetic Oligonucleotide
  misc_feature (26)..(26): n is a, c, g, or t
ctaaccccgggtgtggtgggtgggcnggggggttag

SEQ ID NO: 4398 - DNA, 36 bp, Artificial Sequence
  Synthetic Oligonucleotide
  misc_feature (27)..(27): n is a, c, g, or t
ctaaccccgggtgtggtgggtgggcangggggttag

SEQ ID NO: 4399 - DNA, 36 bp, Artificial Sequence
  Synthetic Oligonucleotide
  misc_feature (28)..(28): n is a, c, g, or t
ctaaccccgggtgtggtgggtgggcagnggggttag

SEQ ID NO: 4400 - DNA, 36 bp, Artificial Sequence
  Synthetic Oligonucleotide
  misc_feature (29)..(29): n is a, c, g, or t
ctaaccccgggtgtggtgggtgggcaggngggttag

SEQ ID NO: 4401 - DNA, 36 bp, Artificial Sequence
  Synthetic Oligonucleotide
  misc_feature (30)..(30): n is a, c, g, or t
ctaaccccgggtgtggtgggtgggcagggnggttag

SEQ ID NO: 4402 - DNA, 36 bp, Artificial Sequence
  Synthetic Oligonucleotide
  misc_feature (31)..(31): n is a, c, g, or t
ctaaccccgggtgtggtgggtgggcaggggngttag

SEQ ID NO: 4403 - DNA, 36 bp, Artificial Sequence
  Synthetic Oligonucleotide
  misc_feature (32)..(32): n is a, c, g, or t
ctaaccccgggtgtggtgggtgggcagggggnttag

SEQ ID NO: 4404 - DNA, 36 bp, Artificial Sequence
  Synthetic Oligonucleotide
  misc_feature (33)..(33): n is a, c, g, or t
ctaaccccgggtgtggtgggtgggcaggggggntag

SEQ ID NO: 4405 - DNA, 36 bp, Artificial Sequence
  Synthetic Oligonucleotide
  misc_feature (34)..(34): n is a, c, g, or t
ctaaccccgggtgtggtgggtgggcaggggggtnag

SEQ ID NO: 4406 - DNA, 36 bp, Artificial Sequence
  Synthetic Oligonucleotide
  misc_feature (35)..(35): n is a, c, g, or t
ctaaccccgggtgtggtgggtgggcaggggggttng

SEQ ID NO: 4407 - DNA, 36 bp, Artificial Sequence
  Synthetic Oligonucleotide
  misc_feature (36)..(36): n is a, c, g, or t
ctaaccccgggtgtggtgggtgggcaggggggttan

SEQ ID NO: 4408 - DNA, 36 bp, Artificial Sequence
  Synthetic Oligonucleotide
ctaaccgggtccacgatcgtgggacggactgtggac

SEQ ID NO: 4409 - protein, 16 aa, Homo Sapiens
KRFILDQTNVSAAAQR

What is claimed is:

1. An oligonucleotide comprising a sequence selected from any one of SEQ ID NOs. 4357-4368 or 4372-4407.

2. An oligonucleotide comprising a sequence according to SEQ ID NO. 4357.

3. An oligonucleotide comprising a sequence selected from any one of SEQ ID NOs. 4357-4368 or 4372-4407, and a 5′ region with sequence 5′-CTAGCATGACTGCAGTACGT (SEQ ID NO. 131), a 3′ region with sequence 5′-CTGTCTCTTATACACATCTGACGCTGCCGACGA (SEQ ID NO. 132), or both.

4. The oligonucleotide of any one of claims 1-3, wherein the oligonucleotide is capable of binding to a target in any one of Table 29, Table 31, Table 32, Table 39, Table 40, Table 41, Tables 46-49, Table 54, Tables 57-59 or a complex comprising such target therein.

5. The oligonucleotide of any one of claims 1-3, wherein the oligonucleotide is capable of regulating cellular expression of a gene in any one of Tables 50-53.

6. The oligonucleotide of any one of claims 1-3, wherein the oligonucleotide is capable of regulating splicing of a gene in Table 55.

7. The oligonucleotide of any one of claims 1-3, wherein the oligonucleotide is capable of regulating MYC function, MALAT1 function, or both.

8. The oligonucleotide of claim 6, wherein the MYC function comprises expression, downstream signaling, transcription regulation, histone acetylation, chromatin remodeling, DNA methylation, or any combination thereof.

9. The oligonucleotide of any one of claims 1-3, wherein the oligonucleotide is capable of binding to Ramos cells, binding to SUDHL1 cells, binding to Ramos 2G6C10 cells, binding to MEC1 cells, killing Ramos cells, killing SUDHL1 cells, killing Ramos 2G6C10 cells, or any combination thereof.

10. The oligonucleotide of any one of claims 1-3, wherein the oligonucleotide is capable of binding to a complex comprising a protein selected from the group consisting of PARP1, HIST1H1B, HIST1H1D, NCL, FBL, SFPQ, RPL12, ACTB, HIST1H4A, SSBP1, NONO, H2AFJ, and DDX21, or a complex, subunit or fragment thereof.

11. The oligonucleotide of any one of claims 1-3, wherein the oligonucleotide is capable of binding to a complex comprising a protein selected from the group consisting of Cluster of Actin, cytoplasmic 1; Nucleolin; Isoform C1 of Heterogeneous nuclear ribonucleoproteins C1/C2; splicing factor, proline- and glutamine-rich; histone H4; Histone H1.5; NHP2-like protein 1; heterogeneous nuclear ribonucleoproteins A2/B1; rRNA 2′-O-methyltransferase fibrillarin; ATP synthase subunit alpha, mitochondrial; Nucleolar RNA helicase 2/DDX21; 60S ribosomal protein L30; 60S ribosomal protein L26, or a complex, subunit or fragment thereof.

12. The oligonucleotide of any one of claims 1-3, wherein the oligonucleotide is capable of binding to Heterogeneous nuclear ribonucleoprotein U (hnRNP U), or a complex, subunit or fragment thereof.

13. The oligonucleotide of any one of claims 1-3, wherein the oligonucleotide is capable of binding to cells comprising cell surface 60S ribosomal protein L11; Histone H1.2, H1.4, H1.3, H1.5; 40S ribosomal protein L11; Histone H4; Heterogeneous nuclear ribonucleoproteins; Histone H2A, H2B; ATP synthase subunit alpha, mitochondrial; rRNA 2′-O-methyltransferase fibrillarin P2; Heterogeneous nuclear ribonucleoprotein H; Nucleolin; Heterogeneous nuclear ribonucleoprotein U, or a complex, subunit or fragment thereof.

14. The oligonucleotide of any one of claims 1-3, wherein the oligonucleotide is capable of binding to cells comprising cell surface Nucleolin; RNA-binding motif protein, X chromosome; Ubiquitin-60S ribosomal protein L40; Heat shock cognate 71 kDa protein; Prohibitin; Heterologous nuclear ribonucleoprotein U; rRNA 2′-O-methyltransferase fibrillarin; RNA-binding protein 14; 78 kDa glucose-regulared protein; 60S ribosomal protein L22; Heterologous nuclear ribonucleoproteins C1/C2; Actin, cytoplasmic 2; Nucleophosmin; Heterologous nuclear ribonucleoprotein A1; Splicing factor, proline- and glutamine-rich; Histone H3.3, or a complex, subunit or fragment thereof.

15. The oligonucleotide of any one of claims 1-3, wherein the oligonucleotide is capable of binding to cells comprising cell surface Cluster of Actin, cytoplasmic 1 (P60709), Nucleolin, Isoform C1 of Heterogeneous nuclear ribonucleoproteins C1/C2, splicing factor, proline- and glutamine-rich, histone H4, Histone H1.5, NHP2-like protein 1, heterogeneous nuclear ribonucleoproteins A2/B1, rRNA 2′-O-methyltransferase fibrillarin, ATP synthase subunit alpha, mitochondrial, Nucleolar RNA helicase 2/DDX21, 60S ribosomal protein L30, 60S ribosomal protein L26, or a complex, subunit or fragment thereof.

16. The oligonucleotide of any one of claims 1-3, wherein the oligonucleotide is capable of binding to cells comprising cell surface Calcyphosin-2; Heterogeneous nuclear ribonucleoprotein U; Non-POU domain-containing octamer-binding protein; Nucleolar RNA helicase 2; Poly [ADP-ribose]polymerase 1; Polyubiquitin-B; heterogeneous nuclear ribonucleoprotein r; Keratin, type 1 cytoskeletal 19, or a complex, subunit or fragment thereof.

17. The oligonucleotide of any one of claims 1-3, wherein the oligonucleotide is capable of binding to cells comprising cell surface 60 kDa heat shock protein, mitochondrial; 78 kDa glucose-regulated protein; Histone H2B type F-S; Isoform 2 of Elongation factor 1-delta; RuvB-like 1; Isoform 2 of ATP synthase subunit alpha, mitochondrial; Prohibitin; Prohibitin-2, or a complex, subunit or fragment thereof.

18. The oligonucleotide of any one of claims 1-3, wherein the oligonucleotide is capable of binding to cells comprising cell surface Nucleolin; histone H4; heterogeneous nuclear ribonucleoproteins A2/B1; Histone H2B type F-S; Heterogeneous nuclear ribonucleoprotein A1; Histone H1.5; 78 kDa glucose-regulated protein; 60 kDa heat shock protein, mitochondrial; Nucleolar RNA helicase 2; Actin, cytoplasmic 1; Ig mu chain C region; Isoform 4 of Interleukin enhancer-binding factor 3; RNA-binding motif protein, X chromosome; RNA-binding protein 14; Isoform 1 of RNA-binding protein Raly; small nuclear ribonucleoprotein sm d3; NHP2-like protein 1; 60S ribosomal protein L12; glyceraldehyde-3-phosphate dehydrogenase; Polyubiquitin-B; RNA-binding protein EWS; Signal recognition particle 14 kDa protein; Poly [ADP-ribose] polymerase 1; Isoform 2 of Heterogeneous nuclear ribonucleoprotein A/B; Polyadenylate-binding protein 1; RNA-binding protein FUS; Non-POU domain-containing octamer-binding protein; Heterogeneous nuclear ribonucleoprotein A0; Heterogeneous nuclear ribonucleoprotein U; Insulin-like growth factor 2 mRNA-binding protein 1; rRNA 2′-O-methyltransferase fibrillarin; Isoform 2 of Elongation factor 1-delta; RuvB-like 1; 60S ribosomal protein L22; Heterogeneous nuclear ribonucleoprotein M; Isoform 2 of Heterogeneous nuclear ribonucleoprotein K; Polymerase delta-interacting protein 3; Histone H1.4; Histone H1.5; Small nuclear ribonucleoprotein Sm D2; histone H2A type 1; Histone H2A type 2-B; Pre-mRNA-processing factor 19; Isoform 2 of Heterogeneous nuclear ribonucleoprotein D0; Single-stranded DNA-binding protein, mitochondrial; 40S ribosomal protein S3; heterogeneous nuclear ribonucleoprotein r; 60S ribosomal protein L23a; Calcyphosin-2; Heat shock cognate 71 kDa protein, or a complex, subunit or fragment thereof.

19. An oligonucleotide comprising a nucleic acid sequence or a portion thereof that is at least 50, 55, 60, 65, 70, 75, 80, 85, 86, 87, 88, 89, 90, 95, 96, 97, 98, 99 or 100 percent homologous to an oligonucleotide sequence according to any preceding claim.

20. A plurality of oligonucleotides comprising at least 1, 2, 3, 4, 5, 6, 7, 8, 9, 10, 11, 12, 13, 14, 15, 16, 17, 18, 19, 20, 25, 30, 40, 45, 50, 55, 60, 65, 70, 75, 80, 85, 90, 95, 100, 110, 120, 130, 140, 150, 160, 170, 180, 190, 200, 300, 400, 500, 600, 700, 800, 900, 1000, 2000, 3000, 4000, 5000, 6000, 7000, 8000, 9000, or at least 10000 different oligonucleotide sequences according to any previous claim.

21. An oligonucleotide aptamer that binds a target protein on the surface of a cell, wherein the binding to the cell results in alternative splicing patterns in the cell, cellular death, or both.

22. The oligonucleotide aptamer of claim 21, wherein the target protein is part of a ribonucleoprotein or spliceosomal complex.

23. The oligonucleotide aptamer of claim 21 or claim 22, wherein the target protein is heterologous nuclear ribonucleoprotein U (hnRNP U).

24. The oligonucleotide aptamer of claim 21 or claim 22, wherein the target protein is selected from the proteins in any one of Table 29, Table 31, Table 32, Table 39, Table 40, Table 41, Tables 46-49, Table 54, Tables 57-59 or a complex comprising such protein therein.

25. The oligonucleotide or the plurality of oligonucleotides according to any preceding claim, wherein the oligonucleotide or the plurality of oligonucleotides comprises a DNA, RNA, 2′-O-methyl or phosphorothioate backbone, or any combination thereof.

26. The oligonucleotide or the plurality of oligonucleotides according to any preceding claim, wherein the oligonucleotide or the plurality of oligonucleotides comprises at least one of DNA, RNA, PNA, LNA, UNA, and any combination thereof.

27. The oligonucleotide or the plurality of oligonucleotides according to any preceding claim, wherein the oligonucleotide or the plurality of oligonucleotides comprises at least one functional modification selected from the group consisting of biotinylation, a non-naturally occurring nucleotide, a deletion, an insertion, an addition, and a chemical modification.

28. The oligonucleotide or plurality of oligonucleotides according to claim 27, wherein the chemical modification comprises at least one of C18, polyethylene glycol (PEG), PEG4, PEG6, PEG8, PEG12, and an SM(PEG)ₙ crosslinker.

29. The oligonucleotide or plurality of oligonucleotides according to any preceding claim, wherein the oligonucleotide or plurality of oligonucleotides is labeled.

30. The oligonucleotide or plurality of oligonucleotides according to any preceding claim, wherein the oligonucleotide or plurality of oligonucleotides is attached to a nanoparticle, liposome, gold, magnetic label, fluorescent label, light emitting particle, or radioactive label.

31. An isolated oligonucleotide or plurality of oligonucleotides according to any preceding claim.

32. A composition comprising the isolated oligonucleotide or plurality of oligonucleotides according to claim 31.

33. The composition of claim 32, wherein the isolated oligonucleotide or plurality of oligonucleotides is capable of binding to Ramos cells, binding to SUDHL1 cells, binding to Ramos 2G6C10 cells, binding to MEC1 cells, killing Ramos cells, killing SUDHL1 cells, killing Ramos 2G6C10 cells, binding to a target in any one of Table 29, Table 31, Table 32, Table 39, Table 40, Table 41, Tables 46-49, Table 54, Tables 57-59 or a complex comprising such target therein, binding to a cell having a protein in any one of Table 29, Table 31, Table 32, Table 39, Table 40, Table 41, Tables 46-49, Table 54, Tables 57-59 or a complex comprising such protein on its surface, binding Heterogeneous nuclear ribonucleoprotein U, modulating cell proliferation, regulating cellular expression of a gene in any one of Tables 50-53, regulating splicing of a gene in Table 55, regulating MYC function, MALAT1 function, or any combination thereof.

34. The composition of claim 33, wherein the cell proliferation is that of lymphoma, leukemia, renal carcinoma, sarcoma, hemangiopericytoma, melanoma, abdominal cancer, gastric cancer, colon cancer, cervical cancer, prostate cancer, pancreatic cancer, breast cancer, or non-small cell lung cancer cells.

35. The composition of claim 33, wherein the cell proliferation is that of leukemia, lymphoma or renal carcinoma cells.

36. A method comprising synthesizing the at least one oligonucleotide or the plurality of oligonucleotides according to any preceding claim.

37. A method comprising contacting a biological sample with the at least one oligonucleotide or the plurality of oligonucleotides according to any one of claims 1-30.

38. The method of claim 37, further comprising detecting a presence or level of at least one protein in any one of Table 29, Table 31, Table 32, Table 39, Table 40, Table 41, Tables 46-49, Table 54, and Tables 57-59, in the biological sample that is bound by the at least one oligonucleotide or at least one member of the plurality of oligonucleotides.

39. The method of claim 37, further comprising detecting a presence or level of a Heterogeneous nuclear ribonucleoprotein U protein or complex thereof in the biological sample that is bound by the at least one oligonucleotide or at least one member of the plurality of oligonucleotides.

40. The method of claim 37, further comprising detecting a presence or level of a cell population in the biological sample that is bound by the at least one oligonucleotide or at least one member of the plurality of oligonucleotides.

41. The method of claim 40, wherein the cell population comprises cells having a disease or disorder.

42. The method of claim 40, wherein the cell population comprises neoplastic, malignant, tumor, hyperplastic, or dysplastic cells.

43. The method of claim 40, wherein the cell population comprises lymphoma, leukemia, renal carcinoma, sarcoma, hemangiopericytoma, melanoma, abdominal cancer, gastric cancer, colon cancer, cervical cancer, prostate cancer, pancreatic cancer, breast cancer, or non-small cell lung cancer cells.

44. The method of any one of claims 38-43, wherein the detecting comprises detecting the at least one oligonucleotide or at least one member of the plurality of oligonucleotides using at least one of sequencing, amplification, hybridization, gel electrophoresis, chromatography, and any combination thereof.

45. The method of claim 44, wherein the sequencing comprises at least one of next generation sequencing, dye termination sequencing, pyrosequencing, and any combination thereof.

46. The method of any one of claims 38-43, wherein the detecting comprises using at least one of an immunoassay, enzyme immunoassay (EIA), enzyme-linked immunosorbent assay (ELISA), enzyme-linked oligonucleotide assay (ELONA), affinity isolation, immunoprecipitation, Western blot, gel electrophoresis, microscopy or flow cytometry.

47. The method of any one of claims 38-43, wherein detecting comprises transmission electron microscopy (TEM) of immunogold labeled oligonucleotides.

48. The method of any one of claims 38-43, wherein detecting comprises confocal microscopy of fluor labeled oligonucleotides.

49. The method of any one of claims 38-39 or 44-48, wherein the bound protein is associated with a microvesicle population.

50. The method of claim 49, further comprising isolating the microvesicle population prior to the contacting, after the contacting, or both.

51. The method of claim 50, wherein the isolating comprises affinity purification, filtration, concentration, polymer precipitation, PEG precipitation, ultracentrifugation, a molecular crowding reagent, affinity selection, chromatography, or any combination thereof.

52. The method of any one of claims 37-51, wherein the biological sample comprises a bodily fluid, tissue sample or cell culture.

53. The method of claim 52, wherein the tissue sample comprises lymphoma, leukemia, renal carcinoma, sarcoma, hemangiopericytoma, melanoma, abdominal cancer, gastric cancer, colon cancer, cervical cancer, prostate cancer, pancreatic cancer, breast cancer, or non-small cell lung cancer tissue.

54. The method of claim 52, wherein the cell culture comprises lymphoma, leukemia, renal carcinoma, sarcoma, hemangiopericytoma, melanoma, abdominal cancer, gastric cancer, colon cancer, cervical cancer, prostate cancer, pancreatic cancer, breast cancer, or non-small cell lung cancer cells.

55. The method of claim 52, wherein the bodily fluid comprises peripheral blood, sera, plasma, ascites, urine, cerebrospinal fluid (CSF), sputum, saliva, bone marrow, synovial fluid, aqueous humor, amniotic fluid, cerumen, breast milk, broncheoalveolar lavage fluid, semen, prostatic fluid, cowper's fluid or pre-ejaculatory fluid, female ejaculate, sweat, fecal matter, hair oil, tears, cyst fluid, pleural and peritoneal fluid, pericardial fluid, lymph, chyme, chyle, bile, interstitial fluid, menses, pus, sebum, vomit, vaginal secretions, mucosal secretion, stool water, pancreatic juice, lavage fluids from sinus cavities, bronchopulmonary aspirates, blastocyl cavity fluid, or umbilical cord blood.

56. The method of claim 52, wherein the bodily fluid comprises whole blood, serum or plasma.

57. The method of claim 55 or 56, wherein the bodily fluid comprises cells selected from the group consisting of lymphoma, leukemia, renal carcinoma, sarcoma, hemangiopericytoma, melanoma, abdominal cancer, gastric cancer, colon cancer, cervical cancer, prostate cancer, pancreatic cancer, breast cancer, or non-small cell lung cancer cells.

58. The method of any one of claims 37-51, wherein the biological sample comprises a purified protein in any one of Table 29, Table 31, Table 32, Table 39, Table 40, Table 41, Tables 46-49, Table 54, Tables 57-59, or complexes, subunits or fragments thereof.

59. The method of any one of claims 52-58, wherein the biological sample further comprises a purified protein in any one of Table 29, Table 31, Table 32, Table 39, Table 40, Table 41, Tables 46-49, Table 54, Tables 57-59, or complexes, subunits or fragments thereof.

60. The method of any one of claims 38-58, wherein the presence or level is used to characterize a phenotype.

61. The method of claim 60, wherein the phenotype is a disease or disorder.

62. The method of claim 61, wherein the characterizing comprises providing, or assisting in providing, at least one of diagnostic, prognostic and theranostic information for the disease or disorder.

63. The method of any one of claims 60-62, wherein the characterizing comprises comparing the presence or level to a reference.

64. The method of claim 63, wherein the reference comprises the presence or level determined in a sample from at least one individual without the phenotype or from at least one individual with a different phenotype.

65. The method any one of claims 60-64, wherein the sample is from a subject suspected of having or being predisposed to the disease or disorder.

66. A kit comprising a reagent for carrying out the method of any of claims 36-65.

67. Use of a reagent for carrying out the method of any of claims 36-65.

68. The kit of claim 66 or use of claim 67, wherein the reagent comprises the at least one oligonucleotide or the plurality of oligonucleotides, one or more primer for amplification or sequencing of such oligonucleotides, at least one binding agent to at least one protein, a binding buffer with or without MgCl₂, a sample processing reagent, a microvesicle isolation reagent, a detection reagent, a secondary detection reagent, a wash buffer, an elution buffer, a solid support, and any combination thereof.

69. The kit or use of claim 68, wherein the microvesicle isolation reagent comprises at least one of a concentrator unit, a filtration unit, a polymer, PEG, a size exclusion column, a binding agent to a microvesicle antigen, and any combination thereof; and/or the detection or secondary detection agent comprises streptavidin-horse radish peroxide (HRP), a streptavidin-conjugated fluorophore, a streptavidin-conjugated quantum dot, and any combination thereof.

70. A method of imaging at least one cell or tissue, comprising contacting the at least one cell or tissue with at least one oligonucleotide or plurality of oligonucleotides according to any one of claims 1-30, and detecting the at least one oligonucleotide or the plurality of oligonucleotides in contact with at least one cell or tissue.

71. The method of claim 70, wherein the at least one oligonucleotide or the plurality of oligonucleotides is according to claim 29 or 30.

72. The method of claim 70 or 71, wherein the at least one oligonucleotide or the plurality of oligonucleotides is administered to a subject prior to the detecting.

73. The method of any one of claims 70-72, wherein the at least one cell or tissue comprises cells displaying a protein in any one of Table 29, Table 31, Table 32, Table 39, Table 40, Table 41, Tables 46-49, Table 54, and Tables 57-59, on their surface.

74. The method any one of claims 70-73, wherein the at least one cell or tissue is from a subject suspected of having or being predisposed to a disease or disorder.

75. The method of any one of claims 70-74, wherein the at least one cell or tissue comprises neoplastic, malignant, tumor, hyperplastic, or dysplastic cells.

76. The method of any one of claims 70-74, wherein the at least one cell or tissue comprises lymphoma, leukemia, renal carcinoma, sarcoma, hemangiopericytoma, melanoma, abdominal cancer, gastric cancer, colon cancer, cervical cancer, prostate cancer, pancreatic cancer, breast cancer, or non-small cell lung cancer cells.

77. A pharmaceutical composition comprising a therapeutically effective amount of the at least one oligonucleotide or the plurality of oligonucleotides according to any one of claims 1-30, or a salt thereof, and a pharmaceutically acceptable carrier, diluent, or both.

78. The pharmaceutical composition of claim 77, wherein the at least one oligonucleotide or the plurality of oligonucleotides is attached to a toxin or chemotherapeutic agent.

79. The pharmaceutical composition of claim 77, wherein the at least one oligonucleotide or the plurality of oligonucleotides is attached to a liposome or nanoparticle.

80. The pharmaceutical composition of claim 79, wherein the liposome or nanoparticle comprises a small molecule, drug, toxin or chemotherapeutic agent.

81. A method of treating or ameliorating a disease or disorder in a subject in need thereof, comprising administering the composition of any of claims 77-80 to the subject.

82. A method of inducing cytotoxicity in a subject, comprising administering the composition of any of claims 77-80 to the subject.

83. A method comprising detecting a transcript or protein in a biological sample from a subject, comparing a presence or level of the transcript to a reference, and administering the composition of any of claims 77-80 to the subject based on the comparison.

84. The method of claim 83, wherein the transcript or protein is selected from any one of Table 29, Table 31, Table 32, Table 39, Table 40, Table 41, Tables 46-55 and Tables 57-59.

85. The method of any one of claims 81-84, wherein the administering comprises at least one of intradermal, intramuscular, intraperitoneal, intravenous, subcutaneous, intranasal, epidural, oral, sublingual, intracerebral, intravaginal, transdermal, rectal, by inhalation, topical administration, or any combination thereof.

86. A nanoparticle conjugated to the at least one oligonucleotide or the plurality of oligonucleotides according to any one of claims 1-30.

87. The nanoparticle of claim 86, wherein the nanoparticle comprises a small molecule, drug, toxin or chemotherapeutic agent.

88. The nanoparticle of claim 86 or claim 87, wherein the nanoparticle is ≤100 nm in diameter.

89. A pharmaceutical composition comprising a therapeutically effective amount of the nanoparticle of claim 86 or claim 87, and a pharmaceutically acceptable carrier, diluent, or both.

90. A method of treating or ameliorating a disease or disorder in a subject in need thereof, comprising administering the pharmaceutical composition of claim 89 to the subject.

91. A method of inducing cytotoxicity in a subject, comprising administering the pharmaceutical composition of claim 89 to the subject.

92. A method comprising detecting a transcript or protein in a biological sample from a subject, comparing a presence or level of the transcript to a reference, and administering the pharmaceutical composition of claim 89 to the subject based on the comparison.

93. The method of claim 83, wherein the transcript or protein is selected from any one of Table 29, Table 31, Table 32, Table 39, Table 40, Table 41, Tables 46-55 or 57-59.

94. The method of any one of claims 90-93, wherein the administering comprises at least one of intradermal, intramuscular, intraperitoneal, intravenous, subcutaneous, intranasal, epidural, oral, sublingual, intracerebral, intravaginal, transdermal, rectal, by inhalation, topical administration, or any combination thereof.

95. A method of immune therapy comprising using a protein in any one of Table 29, Table 31, Table 32, Table 39, Table 40, Table 41, Tables 46-49, Table 54, and Tables 57-59, as a target for CAR-T therapy of a disease or disorder.

96. A method of immune therapy comprising identifying a target of an oligonucleotide probe, and using the target for CAR-T therapy of a disease or disorder.

97. A method comprising identifying an oligonucleotide probe against an MHC loaded with a peptide.

98. The method of claim 97, wherein the identifying is performed with MHC complexes on cells or using an in vitro system.

99. A method comprising using an oligonucleotide probe against an MHC loaded with a peptide to detect or target the loaded MHC.

100. A multipartite construct that comprises a first segment that binds to a first target and a second segment that binds to a second target, wherein the first segment comprises SEQ ID NO. 4357, or a region that is at least 50, 55, 60, 65, 70, 75, 80, 85, 90, 95, 96, 97, 98, 99 or 100 percent homologous thereto.

101. The multipartite construct of claim 100, wherein the first target comprises a protein selected from any one of Table 29, Table 31, Table 32, Table 39, Table 40, Table 41, Tables 46-49, Table 54 or Tables 57-59.

102. The multipartite construct of claim 100, wherein the first target comprises a protein selected from the group consisting of PARP1, HIST1H1B, HIST1H1D, NCL, FBL, SFPQ, RPL12, ACTB, HIST1H4A, SSBP1, NONO, H2AFJ, and DDX21, or a complex, subunit or fragment thereof.

103. The multipartite construct of claim 100, wherein the first target comprises a protein selected from the group consisting of Cluster of Actin, cytoplasmic 1; Nucleolin; Isoform C1 of Heterogeneous nuclear ribonucleoproteins C1/C2; splicing factor, proline- and glutamine-rich; histone H4; Histone H1.5; NHP2-like protein 1; heterogeneous nuclear ribonucleoproteins A2/B1; rRNA 2′-O-methyltransferase fibrillarin; ATP synthase subunit alpha, mitochondrial; Nucleolar RNA helicase 2/DDX21; 60S ribosomal protein L30; 60S ribosomal protein L26, or a complex, subunit or fragment thereof.

104. The multipartite construct of claim 100, wherein the first target comprises Heterogeneous nuclear ribonucleoprotein U or a complex thereof.

105. The multipartite construct of claim 100, wherein the first target comprises a protein selected from the group consisting of 60S ribosomal protein L11; Histone H1.2, H1.4, H1.3, H1.5; 40S ribosomal protein L11; Histone H4; Heterogeneous nuclear ribonucleoproteins; Histone H2A, H2B; ATP synthase subunit alpha, mitochondrial; rRNA 2′-O-methyltransferase fibrillarin P2; Heterogeneous nuclear ribonucleoprotein H; Nucleolin; Heterogeneous nuclear ribonucleoprotein U, or a complex, subunit or fragment thereof.

106. The multipartite construct of claim 100, wherein the first target comprises a protein selected from the group consisting of Nucleolin; RNA-binding motif protein, X chromosome; Ubiquitin-60S ribosomal protein L40; Heat shock cognate 71 kDa protein; Prohibitin; Heterologous nuclear ribonucleoprotein U; rRNA 2′-O-methyltransferase fibrillarin; RNA-binding protein 14; 78 kDa glucose-regulared protein; 60S ribosomal protein L22; Heterologous nuclear ribonucleoproteins C1/C2; Actin, cytoplasmic 2; Nucleophosmin; Heterologous nuclear ribonucleoprotein A1; Splicing factor, proline- and glutamine-rich; Histone H3.3, or a complex, subunit or fragment thereof.

107. The multipartite construct of claim 100, wherein the first target comprises a protein selected from the group consisting of Cluster of Actin, cytoplasmic 1 (P60709), Nucleolin, Isoform C1 of Heterogeneous nuclear ribonucleoproteins C1/C2, splicing factor, proline- and glutamine-rich, histone H4, Histone H1.5, NHP2-like protein 1, heterogeneous nuclear ribonucleoproteins A2/B1, rRNA 2′-O-methyltransferase fibrillarin, ATP synthase subunit alpha, mitochondrial, Nucleolar RNA helicase 2/DDX21, 60S ribosomal protein L30, 60S ribosomal protein L26, or a complex, subunit or fragment thereof.

108. The multipartite construct of claim 100, wherein the first target comprises a protein selected from the group consisting of Calcyphosin-2; Heterogeneous nuclear ribonucleoprotein U; Non-POU domain-containing octamer-binding protein; Nucleolar RNA helicase 2; Poly [ADP-ribose] polymerase 1; Polyubiquitin-B; heterogeneous nuclear ribonucleoprotein r; Keratin, type 1 cytoskeletal 19, or a complex, subunit or fragment thereof.

109. The multipartite construct of claim 100, wherein the first target comprises a protein selected from the group consisting of 60 kDa heat shock protein, mitochondrial; 78 kDa glucose-regulated protein; Histone H2B type F-S; Isoform 2 of Elongation factor 1-delta; RuvB-like 1; Isoform 2 of ATP synthase subunit alpha, mitochondrial; Prohibitin; Prohibitin-2, or a complex, subunit or fragment thereof.

110. The multipartite construct of claim 100, wherein the first target comprises a protein selected from the group consisting of Nucleolin; histone H4; heterogeneous nuclear ribonucleoproteins A2/B1; Histone H2B type F-S; Heterogeneous nuclear ribonucleoprotein A1; Histone H1.5; 78 kDa glucose-regulated protein; 60 kDa heat shock protein, mitochondrial; Nucleolar RNA helicase 2; Actin, cytoplasmic 1; Ig mu chain C region; Isoform 4 of Interleukin enhancer-binding factor 3; RNA-binding motif protein, X chromosome; RNA-binding protein 14; Isoform 1 of RNA-binding protein Raly; small nuclear ribonucleoprotein sm d3; NHP2-like protein 1; 60S ribosomal protein L12; glyceraldehyde-3-phosphate dehydrogenase; Polyubiquitin-B; RNA-binding protein EWS; Signal recognition particle 14 kDa protein; Poly [ADP-ribose] polymerase 1; Isoform 2 of Heterogeneous nuclear ribonucleoprotein A/B; Polyadenylate-binding protein 1; RNA-binding protein FUS; Non-POU domain-containing octamer-binding protein; Heterogeneous nuclear ribonucleoprotein A0; Heterogeneous nuclear ribonucleoprotein U; Insulin-like growth factor 2 mRNA-binding protein 1; rRNA 2′-O-methyltransferase fibrillarin; Isoform 2 of Elongation factor 1-delta; RuvB-like 1; 60S ribosomal protein L22; Heterogeneous nuclear ribonucleoprotein M; Isoform 2 of Heterogeneous nuclear ribonucleoprotein K; Polymerase delta-interacting protein 3; Histone H1.4; Histone H1.5; Small nuclear ribonucleoprotein Sm D2; histone H2A type 1; Histone H2A type 2-B; Pre-mRNA-processing factor 19; Isoform 2 of Heterogeneous nuclear ribonucleoprotein D0; Single-stranded DNA-binding protein, mitochondrial; 40S ribosomal protein S3; heterogeneous nuclear ribonucleoprotein r; 60S ribosomal protein L23a; Calcyphosin-2; Heat shock cognate 71 kDa protein, or a complex, subunit or fragment thereof.

111. The multipartite construct of claim 101, further comprising a first oligonucleotide primer region and/or a second oligonucleotide primer region surrounding the first segment.

112. The multipartite construct of claim 101, wherein the first segment is capable of capable of binding to Ramos cells, binding to SUDHL1 cells, binding to Ramos 2G6C10 cells, binding to MEC1 cells, killing Ramos cells, killing SUDHL1 cells, killing Ramos 2G6C10 cells, binding to a target in any one of Table 29, Table 31, Table 32, Table 39, Table 40, Table 41, Tables 46-49, Table 54, Tables 57-59 or a complex comprising such target therein, binding Heterogeneous nuclear ribonucleoprotein U, modulating cell proliferation, regulating cellular expression of a gene in any one of Tables 50-53, regulating splicing of a gene in Table 55, regulating MYC function, MALAT1 function, or any combination thereof.

113. The multipartite construct of claim 100, wherein the second target comprises an immunomodulatory molecule.

114. The multipartite construct of claim 100, wherein the second target comprises at least one of a member of the innate immune system, a member of the complement system, C1q, C1r, C1s, C1, C3a, C3b, C3d, C5a, C2, C4, and any combination thereof.

115. The multipartite construct of claim 100, wherein the second target comprises C1q or a subunit thereof.

116. The multipartite construct of claim 116, wherein the C1q subunit is the A, B or C subunit.

117. The multipartite construct of claim 115, wherein the A subunit has at least one modification selected from Table 25.

118. The multipartite construct of any of claims 100-117, wherein the second segment comprises an antibody or oligonucleotide.

119. The multipartite construct of claim 118, further comprising a first oligonucleotide primer region and/or a second oligonucleotide primer region surrounding the second segment.

120. The multipartite construct of any of claims 100-119, wherein the second segment comprises an oligonucleotide having a sequence according to any one of SEQ ID NOs. 1472, 1475, 1477, 1482, and 4151-4325, or that is at least 50, 55, 60, 65, 70, 75, 80, 85, 90, 95, 96, 97, 98, 99 or 100 percent homologous thereto.

121. The multipartite construct of claim 100, further comprising a linker region between the first segment and second segment.

122. The multipartite construct of claim 121, wherein the linker region comprises an immunostimulatory sequence and/or an anti-proliferative or pro-apoptotic sequence.

123. The multipartite construct of claim 121, wherein the linker region comprises one or more CpG motif.

124. The multipartite construct of claim 121, wherein the linker region comprises a polyG sequence.

125. The multipartite construct of claim 100, wherein the multipartite construct is further modified to comprise at least one oligonucleotide chemical modification.

126. The multipartite construct of claim 125, wherein the modification is selected from the group consisting: of a chemical substitution at a sugar position; a chemical substitution at a phosphate position; and a chemical substitution at a base position of the nucleic acid.

127. The multipartite construct of claim 125, wherein the modification is selected from the group consisting of: incorporation of a modified nucleotide, 3′ capping, conjugation to an amine linker, conjugation to a high molecular weight, non-immunogenic compound, conjugation to a lipophilic compound, conjugation to a drug, conjugation to a cytotoxic moiety and labeling with a radioisotope.

128. The multipartite construct of claim 127, wherein the non-immunogenic, high molecular weight compound is polyalkylene glycol.

129. The multipartite construct of claim 128, wherein the polyalkylene glycol is polyethylene glycol.

130. The multipartite construct of claim 100, wherein the multipartite construct further comprises an immunostimulating moiety and/or a membrane disruptive moiety.

131. The multipartite construct of any of claims 100-130, wherein the multipartite construct comprises an oligonucleotide polymer, and optionally wherein the multipartite construct is flanked by a first oligonucleotide primer region and a second oligonucleotide primer region.

132. The multipartite construct of any of claims 100-131, wherein the construct comprises an oligonucleotide having a sequence according to any one of SEQ ID NO. 4357-4368 or 4372-4407, or that is at least 50, 55, 60, 65, 70, 75, 80, 85, 90, 95, 96, 97, 98, 99 or 100 percent homologous thereto.

133. A pharmaceutical composition comprising a therapeutically effective amount of the multipartite construct of any of claims 100-132, or a salt thereof, and a pharmaceutically acceptable carrier or diluent.

134. A method of treating or ameliorating a disease or disorder, comprising administering the composition of claim 133 to a subject in need thereof.

135. The method of claim 134, wherein the administering comprises at least one of intradermal, intramuscular, intraperitoneal, intravenous, subcutaneous, intranasal, epidural, oral, sublingual, intracerebral, intravaginal, transdermal, rectal, by inhalation, topical administration, or any combination thereof.

136. A method of inducing killing of a cell, comprising contacting the cell with a multipartite construct of any of claims 100-132.

137. The method of claim 136, wherein the cell comprises a disease or disorder.

138. The method of any one of claims 41, 61-65, 74-76, 81, 85, 90, 94, 96, or 134-137, wherein the disease or disorder comprises a cancer, a premalignant condition, an inflammatory disease, an immune disease, an autoimmune disease or disorder, a cardiovascular disease or disorder, neurological disease or disorder, infectious disease or pain.

139. The method of claim 138, wherein the cancer comprises an acute lymphoblastic leukemia; acute myeloid leukemia; adrenocortical carcinoma; AIDS-related cancers; AIDS-related lymphoma; anal cancer; appendix cancer; astrocytomas; atypical teratoid/rhabdoid tumor; basal cell carcinoma; bladder cancer; brain stem glioma; brain tumor (including brain stem glioma, central nervous system atypical teratoid/rhabdoid tumor, central nervous system embryonal tumors, astrocytomas, craniopharyngioma, ependymoblastoma, ependymoma, medulloblastoma, medulloepithelioma, pineal parenchymal tumors of intermediate differentiation, supratentorial primitive neuroectodermal tumors and pineoblastoma); breast cancer; bronchial tumors; Burkitt lymphoma; cancer of unknown primary site; carcinoid tumor; carcinoma of unknown primary site; central nervous system atypical teratoid/rhabdoid tumor; central nervous system embryonal tumors; cervical cancer; childhood cancers; chordoma; chronic lymphocytic leukemia; chronic myelogenous leukemia; chronic myeloproliferative disorders; colon cancer; colorectal cancer; craniopharyngioma; cutaneous T-cell lymphoma; endocrine pancreas islet cell tumors; endometrial cancer; ependymoblastoma; ependymoma; esophageal cancer; esthesioneuroblastoma; Ewing sarcoma; extracranial germ cell tumor; extragonadal germ cell tumor; extrahepatic bile duct cancer; gallbladder cancer; gastric (stomach) cancer; gastrointestinal carcinoid tumor; gastrointestinal stromal cell tumor; gastrointestinal stromal tumor (GIST); gestational trophoblastic tumor; glioma; hairy cell leukemia; head and neck cancer; heart cancer; Hodgkin lymphoma; hypopharyngeal cancer; intraocular melanoma; islet cell tumors; Kaposi sarcoma; kidney cancer; Langerhans cell histiocytosis; laryngeal cancer; lip cancer; liver cancer; lung cancer; malignant fibrous histiocytoma bone cancer; medulloblastoma; medulloepithelioma; melanoma; Merkel cell carcinoma; Merkel cell skin carcinoma; mesothelioma; metastatic squamous neck cancer with occult primary; mouth cancer; multiple endocrine neoplasia syndromes; multiple myeloma; multiple myeloma/plasma cell neoplasm; mycosis fungoides; myelodysplastic syndromes; myeloproliferative neoplasms; nasal cavity cancer; nasopharyngeal cancer; neuroblastoma; Non-Hodgkin lymphoma; nonmelanoma skin cancer; non-small cell lung cancer; oral cancer; oral cavity cancer; oropharyngeal cancer; osteosarcoma; other brain and spinal cord tumors; ovarian cancer; ovarian epithelial cancer; ovarian germ cell tumor; ovarian low malignant potential tumor; pancreatic cancer; papillomatosis; paranasal sinus cancer; parathyroid cancer; pelvic cancer; penile cancer; pharyngeal cancer; pineal parenchymal tumors of intermediate differentiation; pineoblastoma; pituitary tumor; plasma cell neoplasm/multiple myeloma; pleuropulmonary blastoma; primary central nervous system (CNS) lymphoma; primary hepatocellular liver cancer; prostate cancer; rectal cancer; renal cancer; renal cell (kidney) cancer; renal cell cancer; respiratory tract cancer; retinoblastoma; rhabdomyosarcoma; salivary gland cancer; Sezary syndrome; small cell lung cancer; small intestine cancer; soft tissue sarcoma; squamous cell carcinoma; squamous neck cancer; stomach (gastric) cancer; supratentorial primitive neuroectodermal tumors; T-cell lymphoma; testicular cancer; throat cancer; thymic carcinoma; thymoma; thyroid cancer; transitional cell cancer; transitional cell cancer of the renal pelvis and ureter; trophoblastic tumor; ureter cancer; urethral cancer; uterine cancer; uterine sarcoma; vaginal cancer; vulvar cancer; Waldenstrom macroglobulinemia; or Wilm's tumor.

140. The method of claim 138, wherein the premalignant condition comprises Barrett's Esophagus or a colorectal polyp.

141. The method of claim 138, wherein the autoimmune disease comprises inflammatory bowel disease (IBD), Crohn's disease (CD), ulcerative colitis (UC), pelvic inflammation, vasculitis, psoriasis, diabetes, autoimmune hepatitis, multiple sclerosis, myasthenia gravis, Type I diabetes, rheumatoid arthritis, psoriasis, systemic lupus erythematosis (SLE), Hashimoto's Thyroiditis, Grave's disease, Ankylosing Spondylitis Sjogrens Disease, CREST syndrome, Scleroderma, Rheumatic Disease, organ rejection, Primary Sclerosing Cholangitis, or sepsis.

142. The method of claim 138, wherein the cardiovascular disease comprises atherosclerosis, congestive heart failure, vulnerable plaque, stroke, ischemia, high blood pressure, stenosis, vessel occlusion or a thrombotic event.

143. The method of claim 138, wherein the neurological disease comprises Multiple Sclerosis (MS), Parkinson's Disease (PD), Alzheimer's Disease (AD), schizophrenia, bipolar disorder, depression, autism, Prion Disease, Pick's disease, dementia, Huntington disease (HD), Down's syndrome, cerebrovascular disease, Rasmussen's encephalitis, viral meningitis, neurospsychiatric systemic lupus erythematosus (NPSLE), amyotrophic lateral sclerosis, Creutzfeldt-Jacob disease, Gerstmann-Straussler-Scheinker disease, transmissible spongiform encephalopathy, ischemic reperfusion damage (e.g. stroke), brain trauma, microbial infection, or chronic fatigue syndrome.

144. The method of claim 138, wherein the pain comprises fibromyalgia, chronic neuropathic pain, or peripheral neuropathic pain.

145. The method of claim 138, wherein the infectious disease comprises a bacterial infection, viral infection, yeast infection, Whipple's Disease, Prion Disease, cirrhosis, methicillin-resistant Staphylococcus aureus, HIV, Hepatitis C virus (HCV), Epstein Barr virus, Helicobacter pylori, hepatitis, syphilis, meningitis, malaria, tuberculosis, or influenza.

146. A kit comprising a multipartite construct of any of claims 100-132, or a pharmaceutical composition of claim 133.

147. A kit comprising a reagent for carrying out the method of any of claims 134-145.

148. Use of a reagent for carrying out the method of any of claims 134-145.

149. Use of a reagent for the manufacture of a kit or reagent for carrying out the method of any of claims 134-145.

150. Use of a reagent for the manufacture of a medicament for carrying out the method of any of claims 134-145.

151. The kit of claim 147 or use of any of claims 148-150, wherein the reagent comprises a multipartite construct of any of claims 100-132, or a pharmaceutical composition of claim 133.
